(19) United States
(12) Patent Application Publication
(10) Pub. No.: US 2024/0167026 A1
(43) Pub. Date: May 23, 2024

(54) GENOME EDITING COMPOSITIONS AND METHODS FOR TREATMENT OF WILSON'S DISEASE

(71) Applicant: PRIME MEDICINE, INC., Cambridge, MA (US)

(72) Inventors: Jonathan M. LEVY, Brookline, MA (US); Wei Hsi YEH, Cambridge, MA (US); Aaron Nakwon CHANG, Lexington, MA (US); John STILLER, Cambridge, MA (US)

(21) Appl. No.: 18/526,247

(22) Filed: Dec. 1, 2023

Related U.S. Application Data
(63) Continuation of application No. PCT/US2022/032267, filed on Jun. 3, 2022.
(60) Provisional application No. 63/196,380, filed on Jun. 3, 2021.

(51) Int. Cl. C12N 15/11

(52) U.S. Cl. CPC C12N 15/11; C12N 2310/20

(57) ABSTRACT

Provided herein are compositions and methods of using prime editing systems comprising prime editors and prime editing guide RNAs for treatment of genetic disorders.

### CROSS-REFERENCE

[0001] This application is a continuation of International Application No. PCT/US2022/032267, filed Jun. 3, 2022, which claims the benefit of U.S. Provisional Application No. 63/196,380, filed Jun. 3, 2021, each of which applications are incorporated herein by reference in its entirety.

### SEQUENCE LISTING

[0002] The instant application contains a Sequence Listing which has been submitted electronically in XML format and is hereby incorporated by reference in its entirety. Said XML copy, created on Nov. 30, 2023, is named 59761-721.301 Sequence Listing.xml and is 8,280,972 bytes in size.

### BACKGROUND

[0003] Wilson's disease is an autosomal recessive genetic copper storage disorder caused by mutations in the ATP7B gene (OMIM #606882). ATP7B is located in the human genome on 13q14.3 and contains 20 introns and 21 exons, for a total genomic length of about 80 kb. The ATP7B gene encodes ATPase copper transporting beta (ATP7B), a P-type transmembrane copper-transporting ATPase, which is mainly expressed in hepatic and neural tissues and functions in the transmembrane transport of copper. ATP7B deficiencies may lead to decreased hepatocellular excretion of copper into bile that may lead to systemic copper buildup primarily in the liver and subsequently in the neurologic system and other tissues, hepatic and neural toxicity, and early demise. The accumulation of copper can be manifested as neurological or psychiatric symptom. Over time without proper treatments, high copper levels can cause life-threatening organ damage. Failure to incorporate copper into ceruloplasmin is an additional consequence of the loss of functional ATP7B protein.

[0004] Current treatment approaches for Wilson's disease are daily oral therapy with chelating agents (such as penicillamine [Cuprimine] and trientine hydrochloride [Syprine]), zinc (to block enterocyte absorption of copper), and tetrathiomolybdate (TM), a copper chelator that forms complexes with albumin in the circulation; all of which require the affected individual to take medicines for their whole life. Furthermore, those treatments may cause side effects, such as drug induced lupus, myasthenia, paradoxical worsening, and do not restore normal copper metabolism. Liver transplantation is curative for Wilson's disease but transplant recipients are required to maintain a constant immune suppression regimen to prevent rejection. Therapeutic strategies, such as gene therapy, that can reverse the underlying metabolic defect would be greatly advantageous. However, the ATP7B gene is approximately 4.4 kb, nearing the adeno-associated virus (AAV) packaging size limit and making gene therapy approaches with the full-length gene difficult.

[0005] This disclosure provides Prime Editing methods and compositions for correcting mutations associated with Wilson's disease.

### SUMMARY OF THE INVENTION

[0006] Provided herein, in some embodiments, are methods and compositions for prime editing of alterations in a target sequence in a target gene, for example, an ATP7B gene. The target ATP7B gene may comprise double stranded DNA. As exemplified in FIG. 1, in an embodiment, the target gene is edited by prime editing.

[0007] Without wishing to be bound by any particular theory, the prime editing process may search specific targets and edit endogenous sequences in a target gene, e.g., the ATP7B gene. As exemplified in FIG. 1, the spacer sequence of a PEgRNA recognizes and anneals with a search target sequence in a target strand of the target gene. A prime editing complex may generate a nick in the target gene on the edit strand which is the complementary strand of the target strand. The prime editing complex may then use a free 3′ end formed at the nick site of the edit strand to initiate DNA synthesis, where a primer binding site (PBS) of the PEgRNA complexes with the free 3′ end, and a single stranded DNA is synthesized using an editing template of the PEgRNA as a template. The editing template may comprise one or more nucleotide edits compared to the endogenous target ATP7B gene sequence. Accordingly, the newly-synthesized single stranded DNA also comprises the nucleotide edit(s) encoded by the editing template. Through removal of an editing target sequence on the edit strand of the target gene and DNA repair, the intended nucleotide edit(s) included in the newly synthesized single stranded DNA are incorporated into the target ATP7B gene.

[0008] One embodiment of the disclosure provides a prime editing guide RNA (PEgRNA) comprising: (a) a spacer that is complementary to a search target sequence on a first strand of an ATP7B gene, wherein the spacer comprises at its 3′ end nucleotides 5-20 of SEQ ID NO: 4425; (b) a gRNA core capable of binding to a Cas9 protein; (c) an extension arm comprising: (i) an editing template that comprises a region of complementarity to an editing target sequence on a second strand of the ATP7B gene, and (ii) a primer binding site that comprises at its 5′ end a sequence that is a reverse complement of nucleotides 15-17 of SEQ ID NO: 4425; wherein the first strand and second strand are complementary to each other and wherein the editing target sequence on the second strand is complementary to a portion of the ATP7B gene comprising a c.3207C>A substitution.

[0009] Another embodiment of the disclosure provides a prime editing guide RNA (PEgRNA) comprising: (a) a spacer comprising at its 3′ end nucleotides 5-20 of SEQ ID NO: 4425; (b) a gRNA core capable of binding to a Cas9 protein, and (c) an extension an comprising: (i) an editing template comprising at its 3′ end any one of SEQ ID NOs: 4437-4492, and (ii) a primer binding site (PBS) sequence comprising at its 5′ end any one of SEQ ID NOs: 2297, 4426, 4427, 4428, 4429, 4430, 4431, 4432, 4433, 4434, 4435, and 4436.

[0010] In some embodiments, the spacer of the PEgRNA is front 15 to 22 nucleotides in length. In some embodiments, the spacer of the PEgRNA comprises at its 3′ end nucleotides 4-20, 3-20, 2-20, or 1-20 of SEQ ID NO: 4425. In some embodiments, the spacer of the PEgRNA comprises at its 3′ end SEQ ID NO: 4425. In some embodiments, the spacer of the PEgRNA is 20 nucleotides in length. In some embodiments, the PEgRNA of the present disclosure, comprises from 5′ to 3′, the spacer, the gRNA core, the RTT, and the PBS. In some embodiments, the spacer, the gRNA core, the RTT, and the PBS form a contiguous sequence in a single molecule.

[0011] In some embodiments, the PEgRNA of the present disclosure comprises a pegRNA sequence selected from any one of SEQ ID NOs: 2445, 2446, 2447, 2448, 2449, 2450, 2451, 2452, 2453, 2454, 2455, 2456, 2457, 2458, 2459, 2460, 2461, 2462, 2463, 2464, 2465, 2466, 2467, 2468, 2469, 2470, 2471, 2472, 2473, 2474, 2475, 2476, 2477, 2478, 2479, 2480, 2481, 2482, 2483, 2484, 2485, 2486, 2487, 2488, 2489, 2490, 2491, 2492, 2493, 2494, 2495, 2496, 2497, 2498, 2499, 2500, 2501, 2502, 2503, 2504, 2505, 2506, 2507, 2508, 2509, 2510, 2511, 2512, 2513, 2514, 2515, 2516, 2517, 2518, 2519, 2520, 2521, 2522, 2523, 2524, 2525, 2526, 2527, 2528, 2529, 2530, 2531, 2532, 2533, 2534, 2535, 2538, 2539, 2540, 2541, 2542, 2543, 2544, 2545, 2546, 2547, 2548, 2549, 2550, 2551, 2553, 2554, 2555, 2556, 2557, 2558, 2559, 2560, 2561, 2562, 2563, 2564, 2565, 2566, 2567, 2568, 2569, 2570, 2571, 2572, 2573, 2574, 2575, 2576, 2577, 2578, 2580, 2582, 2584, 2585, 2586, 2587, 2588, 2589, 2590, 2591, 2592, 2593, 2594, 2595, 2596, 2597, 2598, 2600, 2601, 2602, 2603, 2605, 2606, 2607, 2608, 2609, 2610, 2611, 2612, 2613, 2614, 2615, 2616, 2617, 2618, 2619, 2620, 2621, 2623, 2624, 2628, 2629, 2630, 2631, 2632, 2633, 2634, 2635, 2636, 2637, 2638, 2643, 2645, 2646, 2647, 2648, 2649, 2650, 2651, 2652, 2653, 2654, 2655, 2656, 2657, 2658, 2659, 2660, 2663, 2664, 2665, 2667, 2668, 2669, 2670, 2671, 2672, 2674, 2675, 2676, 2677, 2678, 2680, 2681, 2683, 2685, 2687, 2688, 2689, 2690, 2692, 2694, 2695, 2696, 2697, 2699, 2701, 2702, 2704, 2706, 2708, 2711, 2713, 2715, 2716, 2717, 2720, 2721, 2722, 2723, 2725, 2726, 2727, 2728, 2729, 2730, 2733, 2734, 2735, 2744, 2747, 2748, 2749, 2752, 2753, 2757, 2758, 2759, 2760, 2761, 2762, 2764, 2765, 2768, 2769, 2770, 2772, 2773, 2774, 2777, 2786, 2788, 2789, 2790, 2791, 2792, 2793, 2794, 2795, 2796, 2797, 2798, 2799, 2800, 2801, 2802, 2807, 2810, 2811, 2812, 2814, 2816, 2824, 2825, 2826, 2828, 2829, 2830, 2832, 2833, 2834, 2841, 2842, 2843, 2844, 2846, 2847, 2854, 2855, 2856, 2857, 2862, 2864, 2866, 2867, 2868, 2869, 2870, 2871, 2885, 2886, 2887, 2888, 2889, 2890, 2891, 2893, 2894, 2896, 2898, 2899, 2901, 2902, 2909, 2910, 2914, 2916, 2918, 2919, 2920, 2926, 2927, 2932, 2933, 2937, 2938, 2939, 2941, 2942, 2945, 2953, 2954, 2956, 2957, 2960, 2962, 2963, 2964, 2965, 2967, 2972, 2973, 2977, 2979, 2980, 2982, 2983, 2988, 2991, 2993, 2994, 2995, 2997, 3006, 3008, 3012, 3013, 3015, 3023, 3024, 3027, 3028, 3029, 3030, 3031, 3032, 3033, 3034, 3035, 3036, 3037, 3038, 3039, 3043, 3044, 3045, 3046, 3048, 3049, 3050, 3051, 3052, 3053, 3054, 3055, 3059, 3064, 3065, 3071, 3072, 3075, 3076, 3080, 3082, 3084, 3093, 3096, 3098, 3099, 3101, 3119, 3121, 3122, 3123, 3124, 3126, 3128, 3130, 3133, 3142, 3144, 3148, 3159, 3161, 3162, 3163, 3164, 3165, 3166, 3168, 3169, 3170, 3176, 3182, 3188, 3190, 3191, 3195, 3200, 3202, 3203, 3210, 3212, 3216, 3218, 3226, 3227, 3228, 3229, 3230, 3231, 3232, 3234, 3235, 3238, 3239, 3241, 3243, 3244, 3245, 3246, 3247, 3248, 3249, 3250, 3260, 3262, 3263, 3271, 3273, 3275, 3281, 3282, 3283, 3287, 3288, 3289, 3300, 3301, 3302, 3303, 3304, 3305, 3307, 3310, 3311, 3312, 3313, 3314, 3315, 3316, 3317, 3318, 3322, 3324, 3325, 3328, 3330, 3346, 3347, 3348, 3349, 3350, 3358, 3359, 3362, 3364, 3365, 3366, 3367, 3368, 3372, 3373, 3382, 3385, 3387, 3388, 3389, 3390, 3391, 3392, 3393, 3400, 3403, 3404, 3405, 3407, 3408, 3409, 3412, 3414, 3420, 3423, 3425, 3426, 3427, 3428, 3429, 3430, 3431, 3434, 3438, 3441, 3442, 3446, 3449, 3450, 3451, 3452, 3453, 3454, 3455, 3463, 3466, 3469, 3470, 3471, 3472, 3473, 3474, 3477, 3478, 3480, 3481, 3482, 3487, 3490, 3494, 3498, 3499, 3502, 3503, 3505, 3506, 3508, 3509, 3510, 3511, 3513, 3520, 3522, 3523, 3526, 3529, 3533, 3535, 3536, 3542, 3543, 3546, 3547, 3549, 3550, 3553, 3554, 3555, 3557, 3560, 3561, 3563, 3564, 3567, 3568, 3569, 3571, 3574, 3575, 3576, 3578, 3579, 3580, 3581, 3583, 3584, 3585, 3592, 3594, 3595, 3596, 3597, 3603, 3612, 3613, 3617, 3622, 3625, 3626, 3627, 3628, 3630, 3631, 3632, 3633, 3635, 3636, 3638, 3639, 3640, 3641, 3642, 3646, 3647, 3648, 3654, 3657, 3659, 3660, 3661, 3664, 3668, 3669, 3673, 3674, 3678, 3679, 3680, 3681, 3684, 3685, 3687, 3688, 3697, 3699, 3702, 3703, 3704, 3705, 3706, 3708, 3710, 3711, 3712, 3714, 3715, 3721, 3722, 3724, 3725, 3728, 3729, 3730, 3731, 3732, 3733, 3734, 3735, 3736, 3737, 3739, 3740, 3741, 3743, 3744, 3746, 3748, 3755, 3761, 3770, 3771, 3773, 3774, 3776, 3778, 3779, 3781, 3782, 3784, 3785, 3792, 3793, 3794, 3795, 3796, 3797, 3798, 3799, 3800, 3801, 3802, 3803, 3804, 3805, 3806, 3807, 3808, 3809, 3810, 3811, 3812, 3814, 3815, 3816, 3820, 3829, 3839, 3841, 3842, 3843, 3844, 3845, 3851, 3852, 3853, 3854, 3855, 3856, 3857, 3858, 3859, 3860, 3861, 3862, 3863, 3864, 3865, 3868, 3869, 3871, 3874, 3875, 3876, 3877, 3878, 3879, 3880, 3882, 3883, 3884, 3885, 3887, 3895, 3899, 3904, 3907, 3908, 3909, 3910, 3911, 3912, 3913, 3914, 3915, 3916, 3917, 3921, 3924, 3927, 3928, 3929, 3931, 3932, 3935, 3936, 3937, 3938, 3939, 3940, 3941, 3942, 3943, 3945, 3946, 3956, 3957, 3961, 3962, 3965, 3971, 3977, 3978, 3979, 3980, 3981, 3982, 3983, 3985, 3988, 3989, 3990, 3991, 3992, 3993, 3994, 3995, 3997, 3998, 3999, 4001, 4002, 4003, 4004, 4009, 4011, 4012, 4013, 4015, 4016, 4017, 4020, 4021, 4023, 4025, 4026, 4028, 4029, 4031, 4032, 4034, 4035, 4036, 4037, 4038, 4040, 4052, 4055, 4056, 4060, 4061, 4066, 4067, 4070, 4077, 4078, 4080, 4081, 4082, 4083, 4084, 4085, 4086, 4087, 4088, 4089, 4090, 4102, 4105, 4106, 4108, 4109, 4110, 4114, 4115, 4117, 4118, 4119, 4128, 4129, 4132, 4136, 4137, 4142, 4147, 4159, 4163, 4168, 4170, 4171, 4172, 4173, 4175, 4182, 4183, 4186, 4188, 4192, 4194, 4199, 4208, 4225, 4226, 4227, 4228, 4232, 4239, 4240, and 4258.

[0012] In some embodiments, the PEgRNA of the present disclosure provides a pegRNA sequence selected from any one of SEQ ID NOs: 4588, 4657, 4719, 4589, 4624, 4500, 4618, 4649, and 4533.

[0013] Another embodiment of the disclosure provides a prime editing guide RNA (PEgRNA) comprising: (a) a spacer that is complementary to a search target sequence on a first strand of an ATP7B gene, wherein the spacer comprises at its 3′ end nucleotides 5-20 of SEQ ID NO: 2293: (b) a gRNA core capable of binding to a Cas9 protein; (c) an extension arm comprising: (i) an editing template that comprises a region of complementarity to an editing target sequence on a second strand of the ATP7B gene, and (ii) a primer binding site that comprises at its 5′ end a sequence that is a reverse complement of nucleotides 15-17 of SEQ ID NO: 2293; wherein the first strand and second strand are complementary to each other and wherein the editing target sequence on the second strand is complementary to a portion of the ATP7B gene comprising a c.3207C>A substitution.

[0014] Another embodiments of the disclosure provides a prime editing guide RNA (PEgRNA) comprising: (a) a spacer comprising at its 3′ end nucleotides 5-20 of SEQ ID NO: 2293; (b) a gRNA core capable of binding to a Cas9 protein, and (c) an extension arm comprising: (i) an editing template comprising at its 3′ end any one of SEQ ID NOs: 2305-2422, and (ii) a primer binding site (PBS) sequence comprising at its 5′ end any one of SEQ ID NOs: 2294-2304.

[0015] In some embodiments, the spacer of the PEgRNA is from 15 to 22 nucleotides in length. In some embodiments, the spacer of the PEgRNA comprises at its 3′ end nucleotides 4-20, 3-20, 2-20, or 1-20 of SEQ ID NO: 2293. In some embodiments, the spacer of the PEgRNA comprises at its 3′ end SEQ ID NO: 2293. In some embodiments, the spacer of the PEgRNA is 20 nucleotides in length. In some embodiments, the PEgRNA of the present disclosure comprises from 5′ to 3′, the spacer, the gRNA core, the RTT, and the PBS. In some embodiments, the spacer, the gRNA core, the RTT, and the PBS form a contiguous sequence in a single molecule.

[0016] In some embodiments, the PEgRNA of the present disclosure comprises a pegRNA sequence selected from any one of SEQ ID NOs: 2445, 2446, 2447, 2448, 2449, 2450, 2451, 2452, 2453, 2454, 2455, 2456, 2457, 2458, 2459, 2460, 2461, 2462, 2463, 2464, 2465, 2466, 2467, 2468, 2469, 2470, 2471, 2472, 2473, 2474, 2475, 2476, 2477, 2478, 2479, 2480, 2481, 2482, 2483, 2484, 2485, 2486, 2487, 2488, 2489, 2490, 2491, 2492, 2493, 2494, 2495, 2496, 2497, 2498, 2499, 2500, 2501, 2502, 2503, 2504, 2505, 2506, 2507, 2508, 2509, 2510, 2511, 2512, 2513, 2514, 2515, 2516, 2517, 2518, 2519, 2520, 2521, 2522, 2523, 2524, 2525, 2526, 2527, 2528, 2529, 2530, 2531, 2532, 2533, 2534, 2535, 2538, 2539, 2540, 2541, 2542, 2543, 2544, 2545, 2546, 2547, 2548, 2549, 2550, 2551, 2553, 2554, 2555, 2556, 2557, 2558, 2559, 2560, 2561, 2562, 2563, 2564, 2565, 2566, 2567, 2568, 2569, 2570, 2571, 2572, 2573, 2574, 2575, 2576, 2577, 2578, 2580, 2582, 2584, 2585, 2586, 2587, 2588, 2589, 2590, 2591, 2592, 2593, 2594, 2595, 2596, 2597, 2598, 2600, 2601, 2602, 2603, 2605, 2606, 2607, 2608, 2609, 2610, 2611, 2612, 2613, 2614, 2615, 2616, 2617, 2618, 2619, 2620, 2621, 2623, 2624, 2628, 2629, 2630, 2631, 2632, 2633, 2634, 2635, 2636, 2637, 2638, 2643, 2645, 2646, 2647, 2648, 2649, 2650, 2651, 2652, 2653, 2654, 2655, 2656, 2657, 2658, 2659, 2660, 2663, 2664, 2665, 2667, 2668, 2669, 2670, 2671, 2672, 2674, 2675, 2676, 2677, 2678, 2680, 2681, 2683, 2685, 2687, 2688, 2689, 2690, 2692, 2694, 2695, 2696, 2697, 2699, 2701, 2702, 2704, 2706, 2708, 2711, 2713, 2715, 2716, 2717, 2720, 2721, 2722, 2723, 2725, 2726, 2727, 2728, 2729, 2730, 2733, 2734, 2735, 2744, 2747, 2748, 2749, 2752, 2753, 2757, 2758, 2759, 2760, 2761, 2762, 2764, 2765, 2768, 2769, 2770, 2772, 2773, 2774, 2777, 2786, 2788, 2789, 2790, 2791, 2792, 2793, 2794, 2795, 2796, 2797, 2798, 2799, 2800, 2801, 2802, 2807, 2810, 2811, 2812, 2814, 2816, 2824, 2825, 2826, 2828, 2829, 2830, 2832, 2833, 2834, 2841, 2842, 2843, 2844, 2846, 2847, 2854, 2855, 2856, 2857, 2862, 2864, 2866, 2867, 2868, 2869, 2870, 2871, 2885, 2886, 2887, 2888, 2889, 2890, 2891, 2893, 2894, 2896, 2898, 2899, 2901, 2902, 2909, 2910, 2914, 2916, 2918, 2919, 2920, 2926, 2927, 2932, 2933, 2937, 2938, 2939, 2941, 2942, 2945, 2953, 2954, 2956, 2957, 2960, 2962, 2963, 2964, 2965, 2967, 2972, 2973, 2977, 2979, 2980, 2982, 2983, 2988, 2991, 2993, 2994, 2995, 2997, 3006, 3008, 3012, 3013, 3015, 3023, 3024, 3027, 3028, 3029, 3030, 3031, 3032, 3033, 3034, 3035, 3036, 3037, 3038, 3039, 3043, 3044, 3045, 3046, 3048, 3049, 3050, 3051, 3052, 3053, 3054, 3055, 3059, 3064, 3065, 3071, 3072, 3075, 3076, 3080, 3082, 3084, 3093, 3096, 3098, 3099, 3101, 3119, 3121, 3122, 3123, 3124, 3126, 3128, 3130, 3133, 3142, 3144, 3148, 3159, 3161, 3162, 3163, 3164, 3165, 3166, 3168, 3169, 3170, 3176, 3182, 3188, 3190, 3191, 3195, 3200, 3202, 3203, 3210, 3212, 3216, 3218, 3226, 3227, 3228, 3229, 3230, 3231, 3232, 3234, 3235, 3238, 3239, 3241, 3243, 3244, 3245, 3246, 3247, 3248, 3249, 3250, 3260, 3262, 3263, 3271, 3273, 3275, 3281, 3282, 3283, 3287, 3288, 3289, 3300, 3301, 3302, 3303, 3304, 3305, 3307, 3310, 3311, 3312, 3313, 3314, 3315, 3316, 3317, 3318, 3322, 3324, 3325, 3328, 3330, 3346, 3347, 3348, 3349, 3350, 3358, 3359, 3362, 3364, 3365, 3366, 3367, 3368, 3372, 3373, 3382, 3385, 3387, 3388, 3389, 3390, 3391, 3392, 3393, 3400, 3403, 3404, 3405, 3407, 3408, 3409, 3412, 3414, 3420, 3423, 3425, 3426, 3427, 3428, 3429, 3430, 3431, 3434, 3438, 3441, 3442, 3446, 3449, 3450, 3451, 3452, 3453, 3454, 3455, 3463, 3466, 3469, 3470, 3471, 3472, 3473, 3474, 3477, 3478, 3480, 3481, 3482, 3487, 3490, 3494, 3498, 3499, 3502, 3503, 3505, 3506, 3508, 3509, 3510, 3511, 3513, 3520, 3522, 3523, 3526, 3529, 3533, 3535, 3536, 3542, 3543, 3546, 3547, 3549, 3550, 3553, 3554, 3555, 3557, 3560, 3561, 3563, 3564, 3567, 3568, 3569, 3571, 3574, 3575, 3576, 3578, 3579, 3580, 3581, 3583, 3584, 3585, 3592, 3594, 3595, 3596, 3597, 3603, 3612, 3613, 3617, 3622, 3625, 3626, 3627, 3628, 3630, 3631, 3632, 3633, 3635, 3636, 3638, 3639, 3640, 3641, 3642, 3646, 3647, 3648, 3654, 3657, 3659, 3660, 3661, 3664, 3668, 3669, 3673, 3674, 3678, 3679, 3680, 3681, 3684, 3685, 3687, 3688, 3697, 3699, 3702, 3703, 3704, 3705, 3706, 3708, 3710, 3711, 3712, 3714, 3715, 3721, 3722, 3724, 3725, 3728, 3729, 3730, 3731, 3732, 3733, 3734, 3735, 3736, 3737, 3739, 3740, 3741, 3743, 3744, 3746, 3748, 3755, 3761, 3770, 3771, 3773, 3774, 3776, 3778, 3779, 3781, 3782, 3784, 3785, 3792, 3793, 3794, 3795, 3796, 3797, 3798, 3799, 3800, 3801, 3802, 3803, 3804, 3805, 3806, 3807, 3808, 3809, 3810, 3811, 3812, 3814, 3815, 3816, 3820, 3829, 3839, 3841, 3842, 3843, 3844, 3845, 3851, 3852, 3853, 3854, 3855, 3856, 3857, 3858, 3859, 3860, 3861, 3862, 3863, 3864, 3865, 3868, 3869, 3871, 3874, 3875, 3876, 3877, 3878, 3879, 3880, 3882, 3883, 3884, 3885, 3887, 3895, 3899, 3904, 3907, 3908, 3909, 3910, 3911, 3912, 3913, 3914, 3915, 3916, 3917, 3921, 3924, 3927, 3928, 3929, 3931, 3932, 3935, 3936, 3937, 3938, 3939, 3940, 3941, 3942, 3943, 3945, 3946, 3956, 3957, 3961, 3962, 3965, 3971, 3977, 3978, 3979, 3980, 3981, 3982, 3983, 3985, 3988, 3989, 3990, 3991, 3992, 3993, 3994, 3995, 3997, 3998, 3999, 4001, 4002, 4003, 4004, 4009, 4011, 4012, 4013, 4015, 4016, 4017, 4020, 4021, 4023, 4025, 4026, 4028, 4029, 4031, 4032, 4034, 4035, 4036, 4037, 4038, 4040, 4052, 4055, 4056, 4060, 4061, 4066, 4067, 4070, 4077, 4078, 4080, 4081, 4082, 4083, 4084, 4085, 4086, 4087, 4088, 4089, 4090, 4102, 4105, 4106, 4108, 4109, 4110, 4114, 4115, 4117, 4118, 4119, 4128, 4129, 4132, 4136, 4137, 4142, 4147, 4159, 4163, 4168, 4170, 4171, 4172, 4173, 4175, 4182, 4183, 4186, 4188, 4192, 4194, 4199, 4208, 4225, 4226, 4227, 4228, 4232, 4239, 4240, and 4258.

[0017] In some embodiments, the PEgRNA of the present disclosure comprises a pegRNA sequence selected from any one of SEQ ID NOs: 2557, 2988, 2993, and 2585.

[0018] Another embodiment of the disclosure provides a prime editing system comprising: (a) the prime editing guide RNA (PEgRNA) of the present disclosure, or a nucleic acid encoding the PEgRNA; and (b) a nick guide RNA (ngRNA) comprising at its 3′ end nucleotides 5-20 of any one of SEQ ID NOs: 41, 60, 61, 62, 63, 64, 65, 66, 69, 71, 2045, 2046, 2047, 2048, 2049, 2050, 2051, 2052, 2053, 2054, 2055, 2056, 2057, 2058, 2059, 2060, 2061, 2062, 2063, 2064, 2065, 2066, 2067, 2068, 2069, 2070, 2071, 2072, 2073, 2074, 2075, 2076, 2077, 2078, 2079, 2080, 2081, 2082, 2083, 2084, 2085, 2086, 2087, 2088, 2089, 2090, 2091, 2092, 2093, 2094, 2095, 2096, 2423, 2424, 2425, 2426, 2427, 2428, 2429, 2430, 2431, 2432, 2433, 2434, 2435, 2436, 2437, 2438, 2439, 2440, 2441, 2442, 2443, and 2444 and a gRNA core capable of binding to a Cas9 protein, or a nucleic acid encoding the ngRNA.

[0019] In some embodiments, the spacer of the ngRNA is from 15 to 22 nucleotides in length. In some embodiments, the spacer of the ngRNA comprises at its 3′ end nucleotides 4-20, 3-20, 2-20, or 1-20 of any one of SEQ ID NOs: 41, 60, 61, 62, 63, 64, 65, 66, 69, 71, 2045, 2046, 2047, 2048, 2049, 2050, 2051, 2052, 2053, 2054, 2055, 2056, 2057, 2058, 2059, 2060, 2061, 2062, 2063, 2064, 2065, 2066, 2067, 2068, 2069, 2070, 2071, 2072, 2073, 2074, 2075, 2076, 2077, 2078, 2079, 2080, 2081, 2082, 2083, 2084, 2085, 2086, 2087, 2088, 2089, 2090, 2091, 2092, 2093, 2094, 2095, 2096, 2423, 2424, 2425, 2426, 2427, 2428, 2429, 2430, 2431, 2432, 2433, 2434, 2435, 2436, 2437, 2438, 2439, 2440, 2441, 2442, 2443, and 2444. In some embodiments, the spacer of the ngRNA comprises at its 3′ end of any one of SEQ ID NOs: 41, 60, 61, 62, 63, 64, 65, 66, 69, 71, 2045, 2046, 2047, 2048, 2049, 2050, 2051, 2052, 2053, 2054, 2055, 2056, 2057, 2058, 2059, 2060, 2061, 2062, 2063, 2064, 2065, 2066, 2067, 2068, 2069, 2070, 2071, 2072, 2073, 2074, 2075, 2076, 2077, 2078, 2079, 2080, 2081, 2082, 2083, 2084, 2085, 2086, 2087, 2088, 2089, 2090, 2091, 2092, 2093, 2094, 2095, 2096, 2423, 2424, 2425, 2426, 2427, 2428, 2429, 2430, 2431, 2432, 2433, 2434, 2435, 2436, 2437, 2438, 2439, 2440, 2441, 2442, 2443, and 2444.

[0020] In some embodiments, the spacer of the ngRNA is 20 nucleotides in length. In some embodiments, the ngRNA comprises SEQ ID NO: 2257, 2258, 2259, 2260, 2261, 2262, 2263, 2264, 2265, 2266, 2267, 2268, 2269, 2270, 2271, 2272, 2273, 2274, 2275, 2276, 2277, 2278, 2279, 2280, 2281, 2282, 2283, 2284, 2285, 2286, 2287, 2288, 2289, 4410, 4411, 4412, 4413, 4414, 4415, 4416, 4417, 4418, 4419, 4420, 4421, or 4422. In some embodiments, the ngRNA comprises SEQ ID NO: 2268, 2264, 4414, 4412, or 2265. In some embodiments, the prime editing system of present disclosure, further comprises: (c) a prime editor comprising a Cas9 nickase having a nuclease inactivating mutation in the HNH domain, or a nucleic acid encoding the Cas9 nickase, and a reverse transcriptase, or a nucleic acid encoding the reverse transcriptase.

[0021] In some embodiments, the Cas9 nickase comprises an amino acid sequence having at least 80%, 85%, 90%, 95%, 96%, 97%, 98%, 99%, or 100% identity to SEQ ID NO: 5786. In some embodiments, the reverse transcriptase comprises an amino acid sequence having at least 80%, 85%, 90%, 95%, 96%, 97%, 98%, 99%, or 100% identity to SEQ ID NO: 5842. In some embodiments, the sequence identities are determined by Needleman-Wunsch alignment of two protein sequences with Gap Costs set to Existence: 11 Extension: 1 where percent identity is calculated by dividing the number of identities by the length of the alignment. In some embodiments, the prime editor is a fusion protein.

[0022] Another embodiments of the disclosure provides an LNP comprising the prime editing system of the present disclosure. In some embodiments, the PEgRNA, the nucleic acid encoding the Cas9 nickase, and the nucleic acid encoding the reverse transcriptase. In some embodiments, the nucleic acid encoding the Cas9 nickase and the nucleic acid encoding the reverse transcriptase are mRNA. In some embodiments, the nucleic acid encoding the Cas9 nickase and the nucleic acid encoding the reverse transcriptase are the same molecule. In some embodiments, the LNP of the present disclosure, further comprises the ngRNA.

[0023] Another embodiment of the disclosure provides a method of correcting for editing an ATP7B gene, the method comprising contacting the ATP7B gene with: (a) the PEgRNA of the present disclosure and a prime editor comprising a Cas9 nickase having a nuclease inactivating mutation in the HNH domain and a reverse transcriptase, (b) the prime editing system of the present disclosure, or (c) the LNP of the present disclosure.

[0024] In some embodiments, the ATP7B gene is in a cell. In some embodiments, the cell is a mammalian cell. In some embodiments, the cell is a human cell. In some embodiments, the cell is a primary cell. In some embodiments, the cell is a hepatocyte. In some embodiments, the cell is in a subject. In some embodiments, the subject is a human. In some embodiments, the cell is from a subject having Wilson's disease. In some embodiments, the method of the present disclosure, further comprises administering the cell to the subject after incorporation of the intended nucleotide edit.

[0025] Another embodiment of the disclosure provides a cell generated by the method of the present disclosure.

[0026] Another embodiment of the disclosure provides a population of cells generated by the method of the present disclosure.

[0027] Another embodiment of the disclosure provides a method for treating Wilson's disease in a subject in need thereof, the method comprising administering to the subject: (a) the PEgRNA of the present disclosure, (b) the prime editing system of the present disclosure, or (c) the LNP of the present disclosure.

[0028] In some embodiments, the method of the present disclosure, comprises administering to the subject the PEgRNA of the present disclosure and a prime editor comprising a Cas9 nickase having a nuclease inactivating mutation in the HNH domain and a reverse transcriptase or one or more nucleic acids encoding the prime editor or its components. In some embodiments, the prime editor is a fusion protein. Another embodiment of the disclosure provides a prime editing guide RNA (PEgRNA) comprising: (a) a spacer comprising at its 3′ end nucleotides 5-20 of a PEgRNA Spacer sequence selected from any one of Tables 6-32; (b) a gRNA core capable of binding to a Cas9 protein, and (c) an extension arm comprising: (i) an editing template comprising at its 3′ end an RTT sequence selected from the same Table as the PEgRNA Spacer sequence, and (ii) a primer binding site (PBS) comprising at its 5′ end a PBS sequence selected from the same Table as the PEgRNA Spacer sequence.

[0029] In some embodiments, the spacer of the PEgRNA is from 15 to 22 nucleotides in length. In some embodiments, the spacer of the PEgRNA comprises at its 3′ end nucleotides 4-20, 3-20, 2-20, or 1-20 of the PEgRNA Spacer sequence selected from any one of Tables 6-32. In some embodiments, the spacer of the PEgRNA comprises at its 3′ end the PEgRNA Spacer sequence selected from any one of Tables 6-32. In some embodiments, the spacer of the PEgRNA is 20 nucleotides in length. In some embodiments, the PEgRNA of the disclosure, comprises from 5′ to 3′, the spacer, the gRNA core, the editing template, and the PBS. In some embodiments, the spacer, the gRNA core, the editing template, and the PBS form a contiguous sequence in a single molecule. In some embodiments, the PEgRNA of the present disclosure, comprises a pegRNA sequence selected from the same Table as the PEgRNA Spacer sequence. Another embodiment of the disclosure provides a prime editing system comprising: (a) the prime editing guide RNA (PEgRNA) of the present disclosure, or a nucleic acid encoding the PEgRNA; and (b) a nick guide RNA (ngRNA) comprising a spacer comprising at its 3′ end nucleotides 5-20 of any ngRNA Spacer sequence selected from the same Table as the PEgRNA Spacer sequence and a gRNA core capable of binding to a Cas9 protein, or a nucleic acid encoding the ngRNA.

[0030] In some embodiments, the spacer of the ngRNA is from 15 to 22 nucleotides in length. In some embodiments, the spacer of the ngRNA comprises at its 3′ end nucleotides 4-20, 3-20, 2-20, or 1-20 of the ngRNA Spacer sequence selected from the same Table as the PEgRNA Spacer sequence. In some embodiments, the spacer of the ngRNA comprises at its 3′ end the ngRNA Spacer sequence selected from the same Table as the PEgRNA Spacer sequence. In some embodiments, the spacer of the ngRNA is 20 nucleotides in length. In some embodiments, the ngRNA comprises a ngRNA sequence selected from the same Table as the PEgRNA Spacer sequence. In some embodiments, the prime editing system of the present disclosure, further comprises: (c) a prime editor comprising a Cas9 nickase having a nuclease inactivating mutation in the HNH domain, or a nucleic acid encoding the Cas9 nickase, and a reverse transcriptase, or a nucleic acid encoding the reverse transcriptase.

[0031] In some embodiments, the Cas9 nickase comprises an amino acid sequence having at least 80%, 85%, 90%, 95%, 96%, 9%, 98% 99%, or 100% identity to SEQ ID NO: 5786. In some embodiments, the reverse transcriptase comprises an amino acid sequence having at least 80%, 85%, 90%, 95%, 96%, 97%, 98%, 99%, or 100% identity to SEQ ID NO: 5842. In some embodiments, the sequence identities are determined by Needleman-Wunsch alignment of two protein sequences with Gap Costs set to Existence: 11 Extension: 1 where percent identity is calculated by dividing the number of identities by the length of the alignment. In some embodiments, the prime editor is a fusion protein.

[0032] Another embodiment of the disclosure provides an LNP comprising the prime editing system of the present disclosure. In some embodiments, the LNP of the present disclosure, comprises the PEgRNA, the nucleic acid encoding the Cas9 nickase, and the nucleic acid encoding the reverse transcriptase. In some embodiments, the nucleic acid encoding the Cas9 nickase and the nucleic acid encoding the reverse transcriptase are mRNA. In some embodiments, the nucleic acid encoding the Cas9 nickase and the nucleic acid encoding the reverse transcriptase are the same molecule. In some embodiments, the LNP of the present disclosure, further comprises the ngRNA.

[0033] Another embodiment of the disclosure provides a method of correcting for editing an ATP7B gene, the method comprising contacting the ATP7B gene with: (A) the PEgRNA of the present disclosure and a prime editor comprising a Cas9 nickase having a nuclease inactivating mutation in the HNH domain and a reverse transcriptase, (B) the prime editing system of the present disclosure, or (C) the LNP of the present disclosure.

[0034] In some embodiments, the ATP7B gene is in a cell. In some embodiments, the cell is a mammalian cell. In some embodiments, the cell is a human cell. In some embodiments, the cell is a primary cell. In some embodiments, the cell is a hepatocyte. In some embodiments, the cell is in a subject. In some embodiments, the subject is a human. In some embodiments, the cell is from a subject having Wilson's disease. In some embodiments, the method of the present disclosure, further comprises administering the cell to the subject after incorporation of the intended nucleotide edit.

[0035] Another embodiment of the disclosure provides a cell generated by the method of the present disclosure.

[0036] Another embodiment of the disclosure provides a population of cells generated by the method of the present disclosure.

[0037] Another embodiment of the disclosure provides a method for treating Wilson's disease in a subject in need thereof, the method comprising administering to the subject: (a) the PEgRNA of the present disclosure, (B) the prime editing system of the present disclosure, or (C) the LNP of the present disclosure.

[0038] In some embodiments, the method, comprises administering to the subject the PEgRNA of the present disclosure and a prime editor comprising a Cas9 nickase having a nuclease inactivating mutation in the HNH domain and a reverse transcriptase or one or more nucleic acids encoding the prime editor or its components. In some embodiments, the prime editor is a fusion protein.

[0039] Another embodiment of the disclosure provides a prime editing guide RNA (PEgRNA) comprising: a spacer that is complementary to a search target sequence on a first strand of an ATP7B gene, an editing template that comprises a region of complementarity to an editing target sequence on a second strand of the ATP7B gene, and a gRNA core that associates with a prime editor comprising a DNA binding domain and a DNA polymerase domain, wherein the first strand and second strand are complementary to each other, and wherein the editing target sequence is in an exon selected from the group consisting of: exon 8, exon 13, exon 14, exon 15, and exon 17 of the ATP7B gene.

[0040] Another embodiment of the disclosure provides a prime editing guide RNA (PEgRNA) comprising: a spacer that that is complementary to a search target sequence on a first strand of an ATP7B gene, an editing template that comprises a region of complementarity to an editing target sequence on a second strand of the ATP7B gene, and a gRNA core that associates with a prime editor comprising a DNA binding domain and a DNA polymerase domain, wherein first strand and second strand are complementary to each other, and wherein if the editing target sequence is in exon 3 then the editing target sequence does not comprise a c.1288 duplication as compared to a wild type ATP7B gene.

[0041] Another embodiment of the disclosure provides a prime editing guide RNA (PEgRNA) comprising: a spacer that is complementary to a search target sequence on a first strand of an ATP7B gene, an editing template that comprises a region of complementarity to an editing target sequence on a second strand of the ATP7B gene, and a gRNA core that associates with a prime editor comprising a DNA binding domain and a DNA polymerase domain, wherein first strand and second strand are complementary to each other, and wherein the editing target sequence is between positions 51932669-51946368 and positions 51932370-52012130 of human chromosome 13.

[0042] Another embodiment of the disclosure provides a prime editing guide RNA (PEgRNA) comprising: a spacer that is complementary to a search target sequence on a first strand of a ATP7B gene, an editing template that comprises a region of complementarity to an editing target sequence on a second strand of the ATP7B gene, and a gRNA core that associates with a prime editor comprising a DNA binding domain and a DNA polymerase domain, wherein first strand and second strand are complementary to each other, wherein the editing target sequence comprises a mutation associated with Wilson's disease, and wherein the mutation does not encode the amino acid substitution p.Ser430fs.

[0043] In some embodiments, the PEgRNA comprises a primer binding site sequence (PBS) at least partially complementary to the spacer. In some embodiments, wherein the gRNA core is between the spacer and the editing template. In some embodiments, the editing template comprises an intended nucleotide edit compared to the ATP7B gene. In some embodiments, the PEgRNA guides the prime editor to incorporate the intended nucleotide edit into the ATP7B gene when contacted with the ATP7B gene. In some embodiments, the prime editor synthesizes a single stranded DNA encoded by the editing template, wherein the single stranded DNA replaces the editing target sequence and results in incorporation of the intended nucleotide edit into a region corresponding to the editing target in the ATP7B gene.

[0044] In some embodiments, the search target sequence is complementary to a protospacer sequence in the APT7B gene, and wherein the protospacer sequence is adjacent to a search target adjacent motif (PAM) in the ATP7B gene. In some embodiments, the PEgRNA results in incorporation of the intended nucleotide edit in the PAM when contacted with the ATP7B gene. In some embodiments, the PBS is about 2 to 20 base pairs in length. In some embodiments, the PBS is about 8 to 16 base pairs in length. In some embodiments, the editing template is about 4 to 30 base pairs in length. In some embodiments, the editing template is about 10 to 30 base pairs in length. In some embodiments, the PEgRNA results in incorporation of intended nucleotide edit about 0 to 27 base pairs downstream of the 5 end of the PAM when contacted with the ATP7B gene. In some embodiments, the intended nucleotide edit comprises a single nucleotide substitution compared to the region corresponding to the editing target in the ATP7B gene.

[0045] In some embodiments, the intended nucleotide edit comprise an insertion compared to the region corresponding to the editing target in the ATP7B gene. In some embodiments, the intended nucleotide edit comprises a deletion compared to the region corresponding to the editing target in the ATP7B gene. In some embodiments, the editing target sequence comprises a mutation associated with Wilson's disease. In some embodiments, the editing template comprises a wild type ATP7B gene sequence. In some embodiments, the PEgRNA results in correction of the mutation when contacted with the ATP7B gene. In some embodiments, the editing target sequence is between positions 51944045 and 51944245 of human chromosome 13.

[0046] In some embodiments, the intended nucleotide edit comprises an A>C nucleotide substitution at position 51944145 in human chromosome 13 as compared to the region corresponding to the editing target in the ATP7B gene. In some embodiments, the editing target sequence comprises a mutation that encodes an H1069Q amino acid substitution as compared to a wild type ATP7B protein as set forth in SEQ ID NO:5861. In some embodiments, the spacer comprises a sequence selected from the group consisting of SEQ ID Nos. 1, 182, 294, 483, 682, 1505, 2023, 2293, 4425, 5206, 5228, 5248, 5282, 5313, 5340, 5369, 5406, 5423, 5446, 5473, 5503, 5537, 5555, 5638, and 5706. In some embodiments, the editing template comprises a sequence selected from the group consisting of SEQ ID Nos.:13-17, 194-198, 306-336, 495-528, 694-735, 1517-1546, 2035-2044, 2305-2422, 4437-4492, 5218, 5240-5247, 5260-5279, 5294-5302, 5325-5338, 5352-5368, 5381-5401, 5418-5422, 5435-5445, 5458-5472, 5485-5502, 5515-5535, 5549-5554, 5567-5590, 5650-5668, and 5718-5738.

[0047] In some embodiments, the PBS comprises a sequence selected from the group consisting of SEQ ID Nos. 2-12, 183-193, 295-305, 484-494, 683-693, 1506-1516, 2024-2034, 2294-2304, 4426-4436, 5207-5217, 5229-5239, 5249-5259, 5283-5293, 5314-5324, 5341-5351, 5370-5380, 5407-5417, 5424-5434, 5447-5457, 5474-5484, 5504-5514, 5538-5548, 5556-5566, 5639-5649, and 5707-5717.

[0048] In some embodiments, the spacer comprises a sequence selected from the group consisting of SEQ ID Nos. 1, 182, 294, 483, 682, 1505, 2023, 2293, 4425, 5206, 5228, 5248, 5282, 5313, 5340, 5369, 5406, 5423, 5446, 5473, 5503, 5537, 5555, 5638, and 5706.

[0049] In some embodiments, the editing template comprises a sequence selected from the group consisting of SEQ ID Nos. 13-17, 194-198, 306-336, 495-528, 694-735, 1517-1546, 2035-2044, 2305-2422, 4437-4492, 5218, 5240-5247, 5260-5279, 5294-5302, 5325-5338, 5352-5368, 5381-5401, 5418-5422, 5435-5445, 5458-5472, 5485-5502, 5515-5535, 5549-5554, 5567-5590, 5650-5668, and 5718-5738.

[0050] In some embodiments, the PEgRNA comprises a PBS selected from the group consisting of SEQ ID Nos. 2-12, 183-193, 295-305, 484-494, 683-693, 1506-1516, 2024-2034, 2294-2304, 4426-4436, 5207-5217, 5229-5239, 5249-5259, 5283-5293, 5314-5324, 5341-5351, 5370-5380, 5407-5417, 5424-5434, 5447-5457, 5474-5484, 5504-5514, 5538-5548, 5556-5566, 5639-5649, and 5707-5717.

[0051] Another embodiment of the disclosure provides a PEgRNA comprising a sequence selected from the group consisting of SEQ ID Nos. 73-152, 210-289, 338-482, 530-680, 741-1500, 1547-2022, 2097-2256, 2445-4409, 4493-5205, 5591-5637, 5669-5705, and 5739-5779.

[0052] Another embodiment of the disclosure provides a PEgRNA system comprising the PEgRNA of the present disclosure and further comprising a nick guide RNA (ngRNA), wherein the ngRNA comprises an ng spacer that is complementary to a second search target sequence in the ATP7B gene.

[0053] In some embodiments, the second search target sequence is on the second strand of the ATP7B gene. In some embodiments, the ng spacer comprises a sequence selected from the group consisting of SEQ ID Nos. 18-72, 199-209, 337, 529, 736-740, 2045-2096, 2423-2444, 5219-5227, 5280-5281, 5303-5312, 5339, 5402-5405, and 5536. In some embodiments, the ng spacer comprises a sequence selected form SEQ ID Nos. 2052, 2053, 2059, 2438, and 2441. Another embodiment of the disclosure provides a PEgRNA system comprising a PEgRNA selected from the group consisting of SEQ ID Nos. 73-152, 210-289, 338-482, 530-680, 741-1500, 1547-2022, 2097-2256, 2445-4409, 4493-5205, 5591-5637, 5669-5705, or 5739-5779 and a ngRNA selected from the group consisting of SEQ ID Nos. 2290, 2291, 2292, 4423, and 4424.

[0054] Another embodiment of the disclosure provides a PEgRNA system comprising a PEgRNA selected from the group consisting of SEQ ID Nos. 2739, 2785, 3276, 3277, 4536, 4613, 4695, 4721, 4741, 4743, 4762, 4788, and 4824 and a ngRNA selected from the group consisting of SEQ ID Nos. 2290, 2291, 2292, 4423, and 4424.

[0055] Another embodiment of the disclosure provides a prime editing complex comprising: (i) the PEgRNA of the present disclosure or the PEgRNA system of the present disclosure; and (ii) a prime editor comprising a DNA binding domain and a DNA polymerase domain.

[0056] In some embodiments, the DNA binding domain is a CRISPR associated (Cas) protein domain. In some embodiments, the Cas protein domain has nickase activity. In some embodiments, the Cas protein domain is a Cas9. In some embodiments, the Cas9 comprises a mutation in an HNH domain. In some embodiments, the Cas9 comprises a H840A mutation in the HNH domain. In some embodiments, the Cas protein domain is a Cas12b. In some embodiments, the Cas protein domain is a Cas12a, Cas12b, Cas12c, Cas12d, Cas12e, Cas14a, Cas14b, Cas14c, Cas14d, Cas14e, Cas14f, Cas14g, Cas14h, Cas14u, or a Casφ. In some embodiments, the DNA polymerase domain is a reverse transcriptase. In some embodiments, the reverse transcriptase is a retrovirus reverse transcriptase. In some embodiments, the reverse transcriptase is a Moloney murine leukemia virus (M-MLV) reverse transcriptase.

[0057] In some embodiments, the DNA polymerase and the programmable DNA binding domain are fused or linked to form a fusion protein. In some embodiments, the fusion protein comprises the sequence of SEQ ID NO: 10740.

[0058] Another embodiment of the disclosure provides a lipid nanoparticle (LNP) or ribonucleoprotein (RNP) comprising the prime editing complex of the present disclosure, or a component thereof.

[0059] Another embodiment of the disclosure provides a polynucleotide encoding the PEgRNA of the present disclosure, the PEgRNA system of the present disclosure, or the fusion protein of the present disclosure.

[0060] In some embodiments, the polynucleotide is a mRNA. In some embodiments, the polynucleotide is operably linked to a regulatory element. In some embodiments, the regulatory element is an inducible regulatory element.

[0061] Another embodiment of the disclosure provides a vector comprising the polynucleotide of the present disclosure. In some embodiments, the vector is an AAV vector.

[0062] Another embodiment of the disclosure provides an isolated cell comprising the PEgRNA of the present disclosure, the PEgRNA system of the present disclosure, the prime editing complex of the present disclosure, the LNP or RNP of the present disclosure, the polynucleotide of the present disclosure, or the vector of the present disclosure.

[0063] In some embodiments, the cell is a human cell. In some embodiments, the cell is a hepatocyte.

[0064] Another embodiment of the disclosure provides a pharmaceutical composition comprising (i) the PEgRNA of the present disclosure, the PEgRNA system of the present disclosure, the prime editing complex of the present disclosure, the LNP or RNP of the present disclosure, the polynucleotide of the present disclosure, the vector of the present disclosure, or the cell of the present disclosure; and (ii) a pharmaceutically acceptable carrier.

[0065] Another embodiment of the disclosure provides a method for editing an ATP7B gene, the method comprising contacting the ATP7B gene with (i) the PEgRNA of the present disclosure or the PEgRNA system of the present disclosure and (ii) a prime editor comprising a DNA binding domain and a DNA polymerase domain, wherein the PEgRNA directs the prime editor to incorporate the intended nucleotide edit in the ATP7B gene, thereby editing the ATP7B gene.

[0066] Another embodiment of the disclosure provides a method for editing an ATP7B gene, the method comprising contacting the ATP7B gene with the prime editing complex of the present disclosure, wherein the PEgRNA directs the prime editor to incorporate the intended nucleotide edit in the ATP7B gene, thereby editing the ATP7B gene.

[0067] In some embodiments, the prime editor synthesizes a single stranded DNA encoded by the editing template, wherein the single stranded DNA replaces the editing target sequence and results in incorporation of the intended nucleotide edit into a region corresponding to the editing target in the ATP7B gene. In some embodiments, the ATP7B gene is in a cell. In some embodiments, the cell is a mammalian cell. In some embodiments, the cell is a human cell. In some embodiments, wherein the cell is a primary cell. In some embodiments, the cell is a hepatocyte. In some embodiments, the cell is in a subject. In some embodiments, the subject is a human. In some embodiments, the cell is from a subject having Wilson's disease. In some embodiments, the method further comprises administering the cell to the subject after incorporation of the intended nucleotide edit.

[0068] Another embodiment of the disclosure provides a cell generated by the method of the present disclosure.

[0069] Another embodiment of the disclosure provides a population of cells generated by the method of the present disclosure.

[0070] Another embodiment of the disclosure provides a method for treating Wilson's disease in a subject in need thereof, the method comprising administering to the subject (i) the PEgRNA of the present disclosure or the PEgRNA system of the present disclosure and (ii) a prime editor comprising a DNA binding domain and a DNA polymerase domain, wherein the PEgRNA directs the prime editor to incorporate the intended nucleotide edit in the ATP7B gene in the subject, thereby treating Wilson's disease in the subject.

[0071] Another embodiment of the disclosure provides a method for treating Wilson's disease in a subject in need thereof, the method comprising administering to the subject the prime editing complex of the present disclosure, the LNP or RNP of the present disclosure, or the pharmaceutical composition of the present disclosure, wherein the PEgRNA directs the prime editor to incorporate the intended nucleotide edit in the ATP7B gene in the subject, thereby treating Wilson's disease in the subject.

[0072] In some embodiments, the subject is a human. In some embodiment, the ATP7B gene in the subject comprises a mutation that encodes an H1069Q amino acid substitution as compared to a wild type ATP7B protein as set forth in SEQ ID NO:5861. In some embodiment, the ATP7B gene comprises a mutation that encodes an H1069Q amino acid substitution as compared to a wild type ATP7B protein as set forth in SEQ ID NO:5861.

### INCORPORATION BY REFERENCE

[0073] All publications, patents, and patent applications mentioned in this specification are herein incorporated by reference to the same extent as if each individual publication, patent, or patent application was specifically and individually indicated to be incorporated by reference.

### BRIEF DESCRIPTION OF THE DRAWINGS

[0074] The novel features of the invention are set forth with particularity in the appended claims. A better understanding of the features and advantages of the present invention will be obtained by reference to the following detailed description that sets forth illustrative embodiments, in which the principles of the invention are utilized, and the accompanying drawings of which:

[0075] FIG. 1 depicts a schematic of a prime editing guide RNA (PEgRNA) binding to a double stranded target DNA sequence.

[0076] FIG. 2 depicts a PEgRNA architectural overview in an exemplary schematic of PEgRNA designed for a prime editor.

[0077] FIG. 3A depicts a 3′- to 5′ schematic (with the coding strand at the bottom) of an ATP7B H1069 locus with spacer sequences and an H1069Q mutation highlighted. FIG. 3B depicts a lentiviral screen design schematic.

[0078] FIG. 4 is a schematic showing the spacer and gRNA core part of an exemplary guide RNA, in two separate molecules. The rest of the PEgRNA structure is not shown.

### DETAILED DESCRIPTION OF THE INVENTION

[0079] Provided herein, in some embodiments, are compositions and methods to edit the target gene ATP7B with prime editing. In certain embodiments, provided herein are compositions and methods for correction of mutations in the copper-transporting ATPase 2 (ATP7B) gene associated with Wilson's Disease. Compositions provided herein can comprise prime editors (PEs) that may use engineered guide polynucleotides, e.g., prime editing guide RNAs (PEgRNAs), that can direct PEs to specific DNA targets and can encode DNA edits on the target gene ATP7B that serve a variety of functions, including direct correction of disease-causing mutations.

[0080] The following description and examples illustrate embodiments of the present disclosure in detail. It is to be understood that this disclosure is not limited to the particular embodiments described herein and as such can vary. Those of skill in the art will recognize that there are numerous variations and modifications of this disclosure, which are encompassed within its scope. Although various features of the present disclosure can be described in the context of a single embodiment, the features can also be provided separately or in any suitable combination. Conversely, although the present disclosure can be described herein in the context of separate embodiments for clarity, the present disclosure can also be implemented in a single embodiment.

### Definitions

[0081] Unless defined otherwise, all technical and scientific terms used herein have the same meaning as is commonly understood by one of ordinary skill in the art.

[0082] The terminology used herein is for the purpose of describing particular embodiments only and is not intended to be limiting. As used herein, the singular forms “a”, “an” and “the” are intended to include the plural forms as well, unless the context clearly indicates otherwise. Furthermore, to the extent that the terms “including”, “includes”, “having”, “has”, “with”, or variants thereof as used herein mean “comprising”.

[0083] Unless otherwise specified, the words “comprising”, “comprise”, “comprises”, “having”, “have”, “has”, “including”, “includes”, “include”, “containing”, “contains” and “contain” are inclusive or open-ended and do not exclude additional, unrecited elements or method steps.

[0084] Reference to “some embodiments”, “an embodiment”, “one embodiment”, or “other embodiments” means that a particular feature or characteristic described in connection with the embodiments is included in at least one or more embodiments, but not necessarily all embodiments, of the present disclosure.

[0085] The term “about” or “approximately” means within an acceptable error range for the particular value as determined by one of ordinary skill in the art, which will depend in part on how the value is measured or determined, i.e., the limitations of the measurement system. For example, “about” can mean within 1 standard deviation, per the practice in the art. Alternatively, “about” can mean a range of up to 20%, up to 10%, up to 5%, or up to 1% of a given value. Alternatively, particularly with respect to biological systems or processes, the term can mean within an order of magnitude, preferably within 5-fold, and more preferably within 2-fold, of a value. Where particular values are described in the application and claims, unless otherwise stated, the term “about” meaning within an acceptable error range for the particular value should be assumed.

[0086] As used herein, a “cell” can generally refer to a biological cell. A cell can be the basic structural, functional and/or biological unit of a living organism. A cell can originate from any organism having one or more cells. Some non-limiting examples include: a prokaryotic cell, eukaryotic cell, a bacterial cell, an archaeal cell, a cell of a single-cell eukaryotic organism, a protozoa cell, a cell from a plant, an animal cell, a cell from an invertebrate animal (e.g. fruit fly, cnidarian, echinoderm, nematode, etc.), a cell from a vertebrate animal (e.g., fish, amphibian, reptile, bird, mammal), a cell from a mammal (e.g., a pig, a cow, a goat, a sheep, a rodent, a rat, a mouse, a non-human primate, a human, etc.), et cetera. Sometimes a cell may not originate from a natural organism (e.g., a cell can be synthetically made, sometimes termed an artificial cell).

[0087] In some embodiments, the cell is a human cell. A cell may be of or derived from different tissues, organs, and/or cell types. In some embodiments, the cell is a primary cell. As used herein, the term primary cell means a cell isolated from an organism, e.g., a mammal, which is grown in tissue culture (i.e., in vitro) for the first time before subdivision and transfer to a subculture. In some non-limiting examples, mammalian primary cells which can be transfected and further passaged include hepatocytes, fibroblasts, keratinocytes, epithelial cells (e.g., mammary epithelial cells, intestinal epithelial cells), endothelial cells, glial cells, neural cells, formed elements of the blood (e.g., lymphocytes, bone marrow cells), muscle cells and precursors of these somatic cell types. In some embodiments, the cell is a primary hepatocyte. In some embodiments, the cell is a primary human hepatocyte. In some embodiments, the cell is a primary human hepatocyte derived from an induced human pluripotent stem cell (iPSC). In some embodiments, the cell is a neuron. In some embodiments, the cell is a neuron from basal ganglia. In some embodiments, the cell is a neuron from basal ganglia of a subject.

[0088] In some embodiments, the cell comprises a prime editor or a prime editing composition. In some embodiments, the cell is from a human subject. In some embodiments, the human subject has a disease or condition associated with a mutation to be corrected by prime editing, for example, Wilsons's disease. In some embodiments, the cell is from a human subject, and comprises a prime editor or a prime editing composition for correction of the mutation. In some embodiments, the cell is from the human subject and the mutation has been edited or corrected by prime editing.

[0089] The term “substantially” as used herein may refer to a value approaching 100% of a given value. In some embodiments, the term may refer to an amount that may be at least about 70%, 80%, 90%, 91%, 92%, 93%, 94%, 95%, 96%, 97%, 98%, 99%, 99.9%, or 99.99% of a total amount. In some embodiments, the term may refer to an amount that may be about 100% of a total amount.

[0090] The terms “protein” and “polypeptide” can be used interchangeably to refer to a polymer of two or more amino acids joined by covalent bonds (e.g., an amide bond) that can adopt a three-dimensional conformation. In some embodiments, a protein or polypeptide comprises at least 10 amino acids, 15 amino acids, 20 amino acids, 30 amino acids or 50 amino acids joined by covalent bonds (e.g., amide bonds). In some embodiments, a protein comprises at least two amide bonds. In some embodiments, a protein comprises multiple amide bonds. In some embodiments, a protein comprises an enzyme, enzyme precursor proteins, regulatory protein, structural protein, receptor, nucleic acid binding protein, a biomarker, a member of a specific binding pair (e.g., a ligand or aptamer), or an antibody. In some embodiments, a protein may be a full-length protein (e.g., a fully processed protein having certain biological function). In some embodiments, a protein may be a variant or a fragment of a full-length protein. For example, in some embodiments, a Cas9 protein domain comprises an H840A amino acid substitution compared to a naturally occurring S. pyogenes Cas9 protein. A variant of a protein or enzyme, for example a variant reverse transcriptase, comprises a polypeptide having an amino acid sequence that is about 60% identical, about 70% identical, about 80% identical, about 90% identical, about 95% identical, about 96% identical, about 97% identical, about 98% identical, about 99% identical, about 99.5% identical, or about 99.9% identical to the amino acid sequence of a reference protein.

[0091] In some embodiments, a protein comprises one or more protein domains or subdomains. As used herein, the term “polypeptide domain”, “protein domain”, or “domain” when used in the context of a protein or polypeptide, refers to a polypeptide chain that has one or more biological functions, e.g., a catalytic function, a protein-protein binding function, or a protein-DNA function. In some embodiments, a protein comprises multiple protein domains. In some embodiments, a protein comprises multiple protein domains that are naturally occurring. In some embodiments, a protein comprises multiple protein domains from different naturally occurring proteins. For example, in some embodiments, a prime editor may be a fusion protein comprising a Cas9 protein domain of S. pyogenes and a reverse transcriptase protein domain of Moloney murine leukemia virus. A protein that comprises amino acid sequences from different origins or naturally occurring proteins may be referred to as a fusion, or chimeric protein.

[0092] In some embodiments, a protein comprises a functional variant or functional fragment of a full-length wild type protein. A “functional fragment” or “functional portion”, as used herein, refers to any portion of a reference protein (e.g., a wild type protein) that encompasses less than the entire amino acid sequence of the reference protein while retaining one or more of the functions, e.g., catalytic or binding functions. For example, a functional fragment of a reverse transcriptase may encompass less than the entire amino acid sequence of a wild type reverse transcriptase but retains the ability under at least one set of conditions to catalyze the polymerization of a polynucleotide. When the reference protein is a fusion of multiple functional domains, a functional fragment thereof may retain one or more of the functions of at least one of the functional domains. For example, a functional fragment of a Cas9 may encompass less than the entire amino acid sequence of a wild type Cas9 but retains its DNA binding ability and lacks its nuclease activity partially or completely.

[0093] A “functional variant” or “functional mutant”, as used herein, refers to any variant or mutant of a reference protein (e.g., a wild type protein) that encompasses one or more alterations to the amino acid sequence of the reference protein while retaining one or more of the functions, e.g., catalytic or binding functions. In some embodiments, the one or more alterations to the amino acid sequence comprises amino acid substitutions, insertions or deletions, or any combination thereof. In some embodiments, the one or more alterations to the amino acid sequence comprises amino acid substitutions. For example, a functional variant of a reverse transcriptase may comprise one or more amino acid substitutions compared to the amino acid sequence of a wild type reverse transcriptase but retains the ability under at least one set of conditions to catalyze the polymerization of a polynucleotide. When the reference protein is a fusion of multiple functional domains, a functional variant thereof may retain one or more of the functions of at least one of the functional domains. For example, in some embodiments, a functional fragment of a Cas9 may comprise one or more amino acid substitutions in a nuclease domain, e.g., an H840A amino acid substitution, compared to the amino acid sequence of a wild type Cas9, but retains the DNA binding ability and lacks the nuclease activity partially or completely.

[0094] The term “function” and its grammatical equivalents as used herein may refer to a capability of operating, having, or serving an intended purpose. Functional may comprise any percent from baseline to 100% of an intended purpose. For example, functional may comprise or comprise about 5%, 10%, 15%, 20%, 25%, 30%, 35%, 40%, 45%, 50%, 55%, 60%, 65%, 70%, 75%, 80%, 85%, 90%, 95%, or up to about 100% of an intended purpose. In some embodiments, the term functional may mean over or over about 100% of normal function, for example, 125%, 150%, 175%, 200%, 250%, 300%, 400%, 500%, 600%, 700% or up to about 1000% of an intended purpose.

[0095] In some embodiments, a protein or polypeptides includes naturally occurring amino acids (e.g., one of the twenty amino acids commonly found in peptides synthesized in nature, and known by the one letter abbreviations A, R, N, C, D, Q, E, G, H, I, L, K, M, F, P, S, T, W, Y and V). In some embodiments, a protein or polypeptides includes non-naturally occurring amino acids (e.g., amino acids which is not one of the twenty amino acids commonly found in peptides synthesized in nature, including synthetic amino acids, amino acid analogs, and amino acid mimetics). In some embodiments, a protein or polypeptide is modified.

[0096] In some embodiments, a protein comprises an isolated polypeptide. The term “isolated” means free or removed to varying degrees from components which normally accompany it as found in the natural state or environment. For example, a polypeptide naturally present in a living animal is not isolated, and the same polypeptide partially or completely separated from the coexisting materials of its natural state is isolated.

[0097] In some embodiments, a protein is present within a cell, a tissue, an organ, or a virus particle. In some embodiments, a protein is present within a cell or a part of a cell (e.g., a bacteria cell, a plant cell, or an animal cell). In some embodiments, the cell is in a tissue, in a subject, or in a cell culture. In some embodiments, the cell is a microorganism (e.g., a bacterium, fungus, protozoan, or virus). In some embodiments, a protein is present in a mixture of analytes (e.g., a lysate). In some embodiments, the protein is present in a lysate from a plurality of cells or from a lysate of a single cell.

[0098] The terms “homologous,” “homology,” or “percent homology” as used herein refer to the degree of sequence identity between an amino acid or polynucleotide sequence and a corresponding reference sequence. “Homology” can refer to polymeric sequences, e.g., polypeptide or DNA sequences that are similar. Homology can mean, for example, nucleic acid sequences with at least about: 50%, 55%, 60%, 65%, 70%, 75%, 80%, 81%, 82%, 83%, 84%, 85%, 86%, 87%, 88%, 89%, 90%, 91%, 92%, 93%, 94%, 95%, 96%, 97%, 98%, 99%, or 100% identity. In other embodiments, a “homologous sequence” of nucleic acid sequences may exhibit 93%, 95% or 98% sequence identity to the reference nucleic acid sequence. For example, a “region of homology to a genomic region” can be a region of DNA that has a similar sequence to a given genomic region in the genome. A region of homology can be of any length that is sufficient to promote binding of a spacer or protospacer sequence to the genomic region. For example, the region of homology can comprise at least 5, 10, 11, 12, 13, 14, 15, 16, 17, 18, 19, 20, 21, 22, 23, 24, 25, 30, 35, 40, 45, 50, 55, 60, 65, 70, 75, 80, 85, 90, 95, 100, 200, 300, 400, 500, 600, 700, 800, 900, 1000, 1100, 1200, 1300, 1400, 1500, 1600, 1700, 1800, 1900, 2000, 2100, 2200, 2300, 2400, 2500, 2600, 2700, 2800, 2900, 3000, 3100 or more bases in length such that the region of homology has sufficient homology to undergo binding with the corresponding genomic region.

[0099] When a percentage of sequence homology or identity is specified, in the context of two nucleic acid sequences or two polypeptide sequences, the percentage of homology or identity generally refers to the alignment of two or more sequences across a portion of their length when compared and aligned for maximum correspondence. When a position in the compared sequence can be occupied by the same base or amino acid, then the molecules can be homologous at that position. Unless stated otherwise, sequence homology or identity is assessed over the specified length of the nucleic acid, polypeptide or portion thereof. In some embodiments, the homology or identity is assessed over a functional portion or specified portion of the length.

[0100] Alignment of sequences for assessment of sequence homology can be conducted by algorithms known in the art, such as the Basic Local Alignment Search Tool (BLAST) algorithm, which is described in Altschul et al, J. Mol. Biol. 215:403-410, 1990. A publicly available, internet interface, for performing BLAST analyses is accessible through the National Center for Biotechnology Information. Additional known algorithms include those published in: Smith & Waterman, “Comparison of Biosequences”, Adv. Appl. Math. 2:482, 1981; Needleman & Wunsch, “A general method applicable to the search for similarities in the amino acid sequence of two proteins” J. Mol. Biol. 48:443, 1970; Pearson & Lipman “Improved tools for biological sequence comparison”, Proc. Natl. Acad. Sci. USA 85:2444, 1988; or by automated implementation of these or similar algorithms. Global alignment programs can also be used to align similar sequences of roughly equal size. Examples of global alignment programs include NEEDLE (available at www.ebi.ac.uk/Tools/psa/emboss_needle/) which is part of the EMBOSS package (Rice P et al., Trends Genet., 2000; 16: 276-277), and the GGSEARCH program https://fasta.bioch.virginia.edu/fasta_www2/, which is part of the FASTA package (Pearson W and Lipman D, 1988, Proc. Natl. Acad. Sci. USA, 85: 2444-2448). Both of these programs are based on the Needleman-Wunsch algorithm which is used to find the optimum alignment (including gaps) of two sequences along their entire length. A detailed discussion of sequence analysis can also be found in Unit 19.3 of Ausubel et al (“Current Protocols in Molecular Biology” John Wiley & Sons Inc, 1994-1998, Chapter 15, 1998). In some embodiments, alignment between a query sequence and a reference sequence is performed with Needleman-Wunsch alignment with Gap Costs set to Existence: 11 Extension: 1 where percent identity is calculated by dividing the number of identities by the length of the alignment, as further described in Altschul et al. (“Gapped BLAST and PSI-BLAST: a new generation of protein database search programs”, Nucleic Acids Res. 25:3389-3402, 1997) and Altschul et al, (“Protein database searches using compositionally adjusted substitution matrices”, FEBS J. 272:5101-5109, 2005).

[0101] A skilled person understands that amino acid (or nucleotide) positions may be determined in homologous sequences based on alignment, for example, “H840” in a reference Cas9 sequence may correspond to H839, or another position in a Cas9 homolog.

[0102] The term “polynucleotide” or “nucleic acid molecule” can be any polymeric form of nucleotides, including DNA, RNA, a hybridization thereof, or RNA-DNA chimeric molecules. In some embodiments, a polynucleotide comprises cDNA, genomic DNA, mRNA, tRNA, rRNA, or microRNA. In some embodiments, a polynucleotide is double stranded, e.g., a double-stranded DNA in a gene. In some embodiments, a polynucleotide is single-stranded or substantially single-stranded, e.g., single-stranded DNA or an mRNA. In some embodiments, a polynucleotide is a cell-free nucleic acid molecule. In some embodiments, a polynucleotide circulates in blood. In some embodiments, a polynucleotide is a cellular nucleic acid molecule. In some embodiments, a polynucleotide is a cellular nucleic acid molecule in a cell circulating in blood.

[0103] Polynucleotides can have any three-dimensional structure. The following are nonlimiting examples of polynucleotides: a gene or gene fragment (for example, a probe, primer, EST or SAGE tag), an exon, an intron, intergenic DNA (including, without limitation, heterochromatic DNA), messenger RNA (mRNA), transfer RNA (tRNA), ribosomal RNA (rRNA), a ribozyme, cDNA, a recombinant polynucleotide, a branched polynucleotide, a plasmid, a vector, isolated DNA, isolated RNA, sgRNA, guide RNA, a nucleic acid probe, a primer, an snRNA, a long non-coding RNA, a snoRNA, a siRNA, a miRNA, a tRNA-derived small RNA (tsRNA), an antisense RNA, an shRNA, or a small rDNA-derived RNA (srRNA).

[0104] In some embodiments, a polynucleotide comprises deoxyribonucleotides, ribonucleotides or analogs thereof. In some embodiments, a polynucleotide comprises modified nucleotides, such as methylated nucleotides and nucleotide analogs. If present, modifications to the nucleotide structure can be imparted before or after assembly of the polynucleotide. The sequence of nucleotides can be interrupted by non-nucleotide components. A polynucleotide can be further modified after polymerization, such as by conjugation with a labeling component.

[0105] In some embodiments, a polynucleotide is composed of a specific sequence of four nucleotide bases: adenine (A); cytosine (C); guanine (G); thymine (T); and uracil (U) for thymine when the polynucleotide is RNA. In some embodiments, the polynucleotide may comprise one or more other nucleotide bases, such as inosine (I), which is read by the translation machinery as guanine (G).

[0106] In some embodiments, a polynucleotide may be modified. As used herein, the terms “modified” or “modification” refers to chemical modification with respect to the A, C, G, T and U nucleotides. In some embodiments, modifications may be on the nucleoside base and/or sugar portion of the nucleosides that comprise the polynucleotide. In some embodiments, the modification may be on the internucleoside linkage (e.g., phosphate backbone). In some embodiments, multiple modifications are included in the modified nucleic acid molecule. In some embodiments, a single modification is included in the modified nucleic acid molecule.

[0107] The term “complement”, “complementary”, or “complementarity” as used herein, refers to the ability of two polynucleotide molecules to base pair with each other. Complementary polynucleotides may base pair via hydrogen bonding, which may be Watson Crick, Hoogsteen or reversed Hoogsteen hydrogen bonding. For example, an adenine on one polynucleotide molecule will base pair to a thymine or an uracil on a second polynucleotide molecule and a cytosine on one polynucleotide molecule will base pair to a guanine on a second polynucleotide molecule. Two polynucleotide molecules are complementary to each other when a first polynucleotide molecule comprising a first nucleotide sequence can base pair with a second polynucleotide molecule comprising a second nucleotide sequence. For instance, the two DNA molecules 5′-ATGC-3′ and 5′-GCAT-3′ are complementary, and the complement of the DNA molecule 5′-ATGC-3′ is 5′-GCAT-3′. A percentage of complementarity indicates the percentage of nucleotides in a polynucleotide molecule which can base pair with a second polynucleotide molecule (e.g., 5, 6, 7, 8, 9, 10 out of 10 being 50%, 60%, 70%, 80%, 90%, and 100% complementary, respectively). “Perfectly complementary” means that all the contiguous nucleotides of a polynucleotide molecule will base pair with the same number of contiguous nucleotides in a second polynucleotide molecule. “Substantially complementary” as used herein refers to a degree of complementarity that can be 70%, 75%, 80%, 85%, 90%, 95%, 97%, 98%, or 99% over all or a portion of two polynucleotide molecules. In some embodiments, the portion of complementarity may be a region of 10, 15, 20, 25, 30, 35, 40, 45, 50, or more nucleotides. “Substantial complementary” can also refer to a 100% complementarity over a portion of two polynucleotide molecules. In some embodiments, the portion of complementarity between the two polynucleotide molecules is at least 60%, 65%, 70%, 75%, 80%, 85%, 90%, 95%, 97%, 98%, or 99% of the length of at least one of the two polynucleotide molecules or a functional or defined portion thereof.

[0108] As used herein, “expression” refers to the process by which polynucleotides are transcribed into mRNA and/or the process by which polynucleotides, e.g., the transcribed mRNA, translated into peptides, polypeptides, or proteins. If the polynucleotide is derived from genomic DNA, expression may include splicing of the mRNA in a eukaryotic cell. In some embodiments, expression of a polynucleotide, e.g., a gene or a DNA encoding a protein, is determined by the amount of the protein encoded by the gene after transcription and translation of the gene. In some embodiments, expression of a polynucleotide, e.g., a gene or a DNA encoding a protein, is determined by the amount of a functional form of the protein encoded by the gene after transcription and translation of the gene. In some embodiments, expression of a gene is determined by the amount of the mRNA, or transcript, that is encoded by the gene after transcription the gene. In some embodiments, expression of a polynucleotide, e.g., an mRNA, is determined by the amount of the protein encoded by the mRNA after translation of the mRNA. In some embodiments, expression of a polynucleotide, e.g., a mRNA or coding RNA, is determined by the amount of a functional form of the protein encoded by the polypeptide after translation of the polynucleotide.

[0109] The term “sequencing” as used herein, may comprise capillary sequencing, bisulfite-free sequencing, bisulfite sequencing, TET-assisted bisulfite (TAB) sequencing, ACE-sequencing, high-throughput sequencing, Maxam-Gilbert sequencing, massively parallel signature sequencing, Polony sequencing, 454 pyrosequencing, Sanger sequencing, Illumina sequencing, SOLiD sequencing, Ion Torrent semiconductor sequencing, DNA nanoball sequencing, Heliscope single molecule sequencing, single molecule real time (SMRT) sequencing, nanopore sequencing, shot gun sequencing, RNA sequencing, or any combination thereof.

[0110] The terms “equivalent” or “biological equivalent” are used interchangeably when referring to a particular molecule, or biological or cellular material, and means a molecule having minimal homology to another molecule while still maintaining a desired structure or functionality.

[0111] The term “encode” as it is applied to polynucleotides refers to a polynucleotide which is said to “encode” another polynucleotide, a polypeptide, or an amino acid if, in its native state or when manipulated by methods well known to those skilled in the art, it can be used as polynucleotide synthesis template, e.g., transcribed into an RNA, reverse transcribed into a DNA or cDNA, and/or translated to produce an amino acid, or a polypeptide or fragment thereof. In some embodiments, a polynucleotide comprising three contiguous nucleotides form a codon that encodes a specific amino acid. In some embodiments, a polynucleotide comprises one or more codons that encode a polypeptide. In some embodiments, a polynucleotide comprising one or more codons comprises a mutation in a codon compared to a wild-type reference polynucleotide. In some embodiments, the mutation in the codon encodes an amino acid substitution in a polypeptide encoded by the polynucleotide as compared to a wild-type reference polypeptide.

[0112] The term “mutation” as used herein refers to a change and/or alteration in an amino acid sequence of a protein or nucleic acid sequence of a polynucleotide. Such changes and/or alterations may comprise the substitution, insertion, deletion and/or truncation of one or more amino acids, in the case of an amino acid sequence, and/or nucleotides, in the case of nucleic acid sequence, compared to a reference amino acid or nucleic acid sequence. In some embodiments, the reference sequence is a wild-type sequence. In some embodiments, a mutation in a nucleic acid sequence of a polynucleotide encodes a mutation in the amino acid sequence of a polypeptide. In some embodiments, the mutation in the amino acid sequence of the polypeptide or the mutation in the nucleic acid sequence of the polynucleotide is a mutation associated with a disease state.

[0113] The term “subject” and its grammatical equivalents as used herein may refer to a human or a non-human. A subject may be a mammal. A human subject may be male or female. A human subject may be of any age. A subject may be a human embryo. A human subject may be a newborn, an infant, a child, an adolescent, or an adult. A human subject may be up to about 100 years of age. A human subject may be in need of treatment for a genetic disease or disorder.

[0114] The terms “treatment” or “treating” and their grammatical equivalents may refer to the medical management of a subject with an intent to cure, ameliorate, or ameliorate a symptom of, a disease, condition, or disorder. Treatment may include active treatment, that is, treatment directed specifically toward the improvement of a disease, condition, or disorder. Treatment may include causal treatment, that is, treatment directed toward removal of the cause of the associated disease, condition, or disorder. In addition, this treatment may include palliative treatment, that is, treatment designed for the relief of symptoms rather than the curing of the disease, condition, or disorder. Treatment may include supportive treatment, that is, treatment employed to supplement another specific therapy directed toward the improvement of the disease, condition, or disorder. In some embodiments, a condition may be pathological. In some embodiments, a treatment may not completely cure or prevent a disease, condition, or disorder. In some embodiments, a treatment ameliorates, but does not completely cure or prevent a disease, condition, or disorder. In some embodiments, a subject may be treated for 12 hours, 24 hours, 2 days, 3 days, 4 days, 5 days, 6 days, 7 days, 2 weeks, 3 weeks, 4 weeks, 2 months, 3 months, 4 months, 5 months, 6 months, 1 year, 2 years, 3 years, 4 years, 5 years, 6 years, indefinitely, or life of the subject.

[0115] The term “ameliorate” and its grammatical equivalents means to decrease, suppress, attenuate, diminish, arrest, or stabilize the development or progression of a disease.

[0116] The terms “prevent” or “preventing” means delaying, forestalling, or avoiding the onset or development of a disease, condition, or disorder for a period of time. Prevent also means reducing risk of developing a disease, disorder, or condition. Prevention includes minimizing or partially or completely inhibiting the development of a disease, condition, or disorder. In some embodiments, a composition, e.g. a pharmaceutical composition, prevents a disorder by delaying the onset of the disorder for 12 hours, 24 hours, 2 days, 3 days, 4 days, 5 days, 6 days, 7 days, 2 weeks, 3 weeks, 4 weeks, 2 months, 3 months, 4 months, 5 months, 6 months, 1 year, 2 years, 3 years, 4 years, 5 years, 6 years, indefinitely, or life of a subject.

[0117] The term “effective amount” or “therapeutically effective amount” may refer to a quantity of a composition, for example a composition comprising a construct, that can be sufficient to result in a desired activity upon introduction into a subject as disclosed herein. An effective amount of the prime editing compositions can be provided to the target gene or cell, whether the cell is ex vivo or in vivo. An effective amount can be the amount to induce, for example, at least about a 2-fold change (increase or decrease) or more in the amount of target nucleic acid modulation (e.g., expression of ATP7B gene to produce functional ATP7B protein) observed relative to a negative control. An effective amount or dose can induce, for example, about 2-fold increase, about 3-fold increase, about 4-fold increase, about 5-fold increase, about 6-fold increase, about 7-fold increase, about 8-fold increase, about 9-fold increase, about 10-fold increase, about 25-fold increase, about 50-fold increase, about 100-fold increase, about 200-fold increase, about 500-fold increase, about 700-fold increase, about 1000-fold increase, about 5000-fold increase, or about 10,000-fold increase in target gene modulation (e.g., expression of a target ATP7B gene to produce functional ATP7B protein). The amount of target gene modulation may be measured by any suitable method known in the art. In some embodiments, the “effective amount” or “therapeutically effective amount” is the amount of a composition that is required to ameliorate the symptoms of a disease relative to an untreated patient. In some embodiments, an effective amount is the amount of a composition sufficient to introduce an alteration in a gene of interest in a cell (e.g., a cell in vitro or in vivo).

[0118] As used herein, the terms “Wilson's disease,” “Wilsons disease,” and “Wilson disease” are used interchangeably. Wilson's disease is a monogenic autosomal-recessive disorder caused by pathogenic variants in ATP7B that decrease ATP7B function in hepatocytes and reduce excretion of excess copper into bile, leading to systemic copper buildup, hepatic and neural toxicity, and early demise. In some embodiments, mutations in the ATP7B gene are associated with diseases including Wilson's disease. The ATP7B gene codes for a copper transporter expressed in hepatic and neural tissues. The gene product is synthesized in the endoplasmic reticulum, then relocated to the trans Golgi network (TGN) within hepatocytes. ATP7B is most highly expressed in the liver, but is also found in the kidney, placenta, mammary glands, brain, and lung. Alternate names for ATP7B include: ATPase Copper Transporting Beta, Copper-Transporting ATPase, Copper Pump. ATPase, Cu++ Transporting. Beta Polypeptide, Wilson Disease-Associated Protein, PWD, WC1, WND, ATPase, Cu++ Transporting, Beta Polypeptide (Wilson Disease) 2. ATPase, Cu(2+)-Transporting, Beta Polypeptide, Copper-Transporting Protein ATP7B, Wilson Disease, EC 3.6.3.4, EC 7.2.2.8. EC 363, WD. In the human genome the ATP7B gene is located on 13q14.3 and contains 20 introns and 21 exons, for a total genomic length of 80 kb (chr13:51,930,436-52,012,130 (GRCh38/hg38)).

[0119] More than 600 pathogenic variants in ATP7B have been identified, with single-nucleotide missense and nonsense mutations being the most common, followed by insertions/deletions splice site mutations. A histidine-to-glutamate substitution at amino acid 1069 (p.H1069Q) (caused by c.3207C>A) in ATP7B maybe one of the most common cause of Wilson's disease, with a population allelic frequency of 10-40% (e.g., 30-70% among Caucasians. The p.H1069Q mutation occurs when histidine of the conserved SEHPL motif (SEQ ID NO: 5896) in the N-domain of ATP7B is replaced by glutamic acid, resulting in N-domain protein misfolding, abnormal phosphorylation in the P-domain, and decreased ATP binding affinity. This mutation may also lead to decreased heat stability and abnormal localization of the protein to the trans-Golgi network.

### Prime Editing

[0120] The term “prime editing” refers to programmable editing of a target DNA using a prime editor complexed with a PEgRNA to incorporate an intended nucleotide edit into the target DNA through target-primed DNA synthesis. A target gene of prime editing may comprise a double stranded DNA molecule having two complementary strands: a first strand that may be referred to as a “target strand” or a “non-edit strand”, and a second strand that may be referred to as a “non-target strand,” or an “edit strand.” In some embodiments, in a prime editing guide RNA (PEgRNA), a spacer sequence is complementary or substantially complementary to a specific sequence on the target strand, which may be referred to as a “search target sequence”. In some embodiments, the spacer sequence anneals with the target strand at the search target sequence. The target strand may also be referred to as the “non-Protospacer Adjacent Motif (non-PAM strand).” In some embodiments, the non-target strand may also be referred to as the “PAM strand”. In some embodiments, the PAM strand comprises a protospacer sequence and optionally a PAM sequence. A protospacer sequence refers to a specific sequence in the PAM strand of the target gene that is complementary to the search target sequence. In a PEgRNA, a spacer sequence may have a substantially identical sequence as the protospacer sequence on the edit strand of a target gene, except that the spacer sequence may comprise Uracil (U) and the protospacer sequence may comprise Thymine (T).

[0121] In some embodiments, the double stranded target DNA comprises a nick site on the PAM strand (or non-target strand). As used herein, a “nick site” refers to a specific position in between two nucleotides or two base pairs of the double stranded target DNA. In some embodiments, the position of a nick site is determined relative to the position of a specific PAM sequence. In some embodiments, the nick site is the particular position where a nick will occur when the double stranded target DNA is contacted with a nickase, for example, a Cas nickase, that recognizes a specific PAM sequence. In some embodiments, the nick site is upstream of a specific PAM sequence on the PAM strand of the double stranded target DNA. In some embodiments, the nick site is downstream of a specific PAM sequence on the PAM strand of the double stranded target DNA. In some embodiments, the nick site is upstream of a PAM sequence recognized by a Cas9 nickase, wherein the Cas9 nickase comprises a nuclease active RuvC domain and a nuclease inactive NHN domain. In some embodiments, the nick site is 3 nucleotides upstream of the PAM sequence, and the PAM sequence is recognized by a Streptococcus pyogenes Cas9 nickase, a P. lavamentivorans Cas9 nickase, a C. diphtheriae Cas9 nickase, a N. cinerea Cas9, a S. aureus Cas9, or a N. lari Cas9 nickase that comprises a nuclease active RuvC domain and a nuclease inactive NHN domain. In some embodiments, the nick site is 2 nucleotides upstream of the PAM sequence, and the PAM sequence is recognized by a S. thermophilus Cas9 nickase that comprises a nuclease active RuvC domain and a nuclease inactive NHN domain.

[0122] A “primer binding site” (also referred to as PBS or primer binding site sequence) is a single-stranded portion of the PEgRNA that comprises a region of complementarity to the PAM strand (i.e., the non-target strand or the edit strand). The PBS is complementary or substantially complementary to a sequence on the PAM strand of the double stranded target DNA that is immediately upstream of the nick site. In some embodiments, in the process of prime editing, the PEgRNA complexes with and directs a prime editor to bind the search target sequence on the target strand of the double stranded target DNA, and generates a nick at the nick site on the non-target strand of the double stranded target DNA. In some embodiments, the PBS is complementary to or substantially complementary to, and can anneal to, a free 3′ end on the non-target strand of the double stranded target DNA at the nick site. In some embodiments, the PBS annealed to the free 3′ end on the non-target strand can initiate target-primed DNA synthesis.

[0123] An “editing template” of a PEgRNA is a single-stranded portion of the PEgRNA that is 5′ of the PBS and comprises a region of complementarity to the PAM strand (i.e. the non-target strand or the edit strand), and comprises one or more intended nucleotide edits compared to the endogenous sequence of the double stranded target DNA. In some embodiments, the editing template and the PBS are immediately adjacent to each other. Accordingly, in some embodiments, a PEgRNA in prime editing comprises a single-stranded portion that comprises the PBS and the editing template immediately adjacent to each other. In some embodiments, the single stranded portion of the PEgRNA comprising both the PBS and the editing template is complementary or substantially complementary to an endogenous sequence on the PAM strand (i.e., the non-target strand or the edit strand) of the double stranded target DNA except for one or more non-complementary nucleotides at the intended nucleotide edit positions. As used herein, regardless of relative 5′-3′ positioning in other context, the relative positions as between the PBS and the editing template, and the relative positions as among elements of a PEgRNA, are determined by the 5′ to 3′ order of the PEgRNA as a single molecule regardless of the position of sequences in the double stranded target DNA that may have complementarity or identity to elements of the PEgRNA. In some embodiments, the editing template is complementary or substantially complementary to a sequence on the PAM strand that is immediately downstream of the nick site, except for one or more non-complementary nucleotides at the intended nucleotide edit positions. The endogenous, e.g., genomic, sequence that is complementary or substantially complementary to the editing template, except for the one or more non-complementary nucleotides at the position corresponding to the intended nucleotide edit, may be referred to as an “editing target sequence”. In some embodiments, the editing template has identity or substantial identity to a sequence on the target strand that is complementary to, or having the same position in the genome as, the editing target sequence, except for one or more insertions, deletions, or substitutions at the intended nucleotide edit positions. In some embodiments, the editing template encodes a single stranded DNA, wherein the single stranded DNA has identity or substantial identity to the editing target sequence except for one or more insertions, deletions, or substitutions at the positions of the one or more intended nucleotide edits.

[0124] In some embodiments, a PEgRNA complexes with and directs a prime editor to bind to the search target sequence of the target gene. In some embodiments, the bound prime editor generates a nick on the edit strand (PAM strand) of the target gene. In some embodiments, a primer binding site (PBS) of the PEgRNA anneals with a free 3′ end formed at the nick site, and the prime editor initiates DNA synthesis from the nick site, using the free 3′ end as a primer. Subsequently, a single-stranded DNA encoded by the editing template of the PEgRNA is synthesized. In some embodiments, the newly synthesized single-stranded DNA comprises one or more intended nucleotide edits compared to the endogenous target gene sequence. Accordingly, in some embodiments, the editing template of a PEgRNA is complementary to a sequence in the edit strand except for one or more mismatches at the intended nucleotide edit positions in the editing template. The endogenous, e.g., genomic, sequence that is partially complementary to the editing template may be referred to as an “editing target sequence”.

[0125] In some embodiments, the newly synthesized single-stranded DNA equilibrates with the editing target on the edit strand of the target gene for pairing with the target strand of the target gene. In some embodiments, the editing target sequence of the target gene is excised by a flap endonuclease (FEN), for example, FEN1. In some embodiments, the FEN is an endogenous FEN, for example, in a cell comprising the target gene. In some embodiments, the FEN is provided as part of the prime editor, either linked to other components of the prime editor or provided in trans. In some embodiments, the newly synthesized single stranded DNA, which comprises the intended nucleotide edit, replaces the endogenous single stranded editing target sequence on the edit strand of the target gene. In some embodiments, the newly synthesized single stranded DNA and the endogenous DNA on the target strand form a heteroduplex DNA structure at the region corresponding to the editing target sequence of the target gene. In some embodiments, the newly synthesized single-stranded DNA comprising the nucleotide edit is paired in the heteroduplex with the target strand of the target DNA that does not comprise the nucleotide edit, thereby creating a mismatch. In some embodiments, the mismatch is recognized by DNA repair machinery, e.g., an endogenous DNA repair machinery. In some embodiments, through DNA repair, the intended nucleotide edit is incorporated into the target gene.

### Prime Editor

[0126] The term “prime editor (PE)” refers to the polypeptide or polypeptide components involved in prime editing. In various embodiments, a prime editor includes a polypeptide domain having DNA binding activity and a polypeptide domain having DNA polymerase activity. In some embodiments, the prime editor further comprises a polypeptide domain having nuclease activity. In some embodiments, the polypeptide domain having DNA binding activity comprises a nuclease domain or nuclease activity. In some embodiments, the polypeptide domain having nuclease activity comprises a nickase, or a fully active nuclease. As used herein, the term “nickase” refers to a nuclease capable of cleaving only one strand of a double-stranded DNA target. In some embodiments, the prime editor comprises a polypeptide domain that is an inactive nuclease. In some embodiments, the polypeptide domain having programmable DNA binding activity comprises a nucleic acid guided DNA binding domain, for example, a CRISPR-Cas protein, for example, a Cas9 nickase, a Cpf1 nickase, or another CRISPR-Cas nuclease. In some embodiments, the polypeptide domain having DNA polymerase activity comprises a template-dependent DNA polymerase, for example, a DNA-dependent DNA polymerase or an RNA-dependent DNA polymerase. In some embodiments, the DNA polymerase is a reverse transcriptase. In some embodiments, the prime editor comprises additional polypeptides involved in prime editing, for example, a polypeptide domain having 5′ endonuclease activity, e.g., a 5′ endogenous DNA flap endonucleases (e.g., FEN1), for helping to drive the prime editing process towards the edited product formation. In some embodiments, the prime editor further comprises an RNA-protein recruitment polypeptide, for example, a MS2 coat protein.

[0127] A prime editor may be engineered. In some embodiments, the polypeptide components of a prime editor do not naturally occur in the same organism or cellular environment. In some embodiments, the polypeptide components of a prime editor may be of different origins or from different organisms. In some embodiments, a prime editor comprises a DNA binding domain and a DNA polymerase domain that are derived from different species. In some embodiments, a prime editor comprises a Cas polypeptide and a reverse transcriptase polypeptide that are derived from different species. For example, a prime editor may comprise a S. pyogenes Cas9 polypeptide and a Moloney murine leukemia virus (M-MLV) reverse transcriptase polypeptide.

[0128] In some embodiments, polypeptide domains of a prime editor may be fused or linked by a peptide linker to form a fusion protein. In other embodiments, a prime editor comprises one or more polypeptide domains provided in trans as separate proteins, which are capable of being associated to each other through non-peptide linkages or through aptamers or recruitment sequences. For example, a prime editor may comprise a DNA binding domain and a reverse transcriptase domain associated with each other by an RNA-protein recruitment aptamer, e.g. a MS2 aptamer, which may be linked to a PEgRNA. Prime editor polypeptide components may be encoded by one or more polynucleotides in whole or in part. In some embodiments, a single polynucleotide, construct, or vector encodes the prime editor fusion protein. In some embodiments, multiple polynucleotides, constructs, or vectors each encode a polypeptide domain or portion of a domain of a prime editor, or a portion of a prime editor fusion protein. For example, a prime editor fusion protein may comprise an N-terminal portion fused to an intein-N and a C-terminal portion fused to an intein-C, each of which is individually encoded by an AAV vector. In some embodiments, a prime editor comprises a nucleotide polymerase domain, e.g. a DNA polymerase domain. The DNA polymerase domain may be a wild-type DNA polymerase domain, a full-length DNA polymerase protein domain, or may be a functional mutant, a functional variant, or a functional fragment thereof. In some embodiments, the polymerase domain is a template dependent polymerase domain. For example, the DNA polymerase may rely on a template polynucleotide strand, e.g., the editing template sequence, for new strand DNA synthesis. In some embodiments, the prime editor comprises a DNA-dependent DNA polymerase. For example, a prime editor having a DNA-dependent DNA polymerase can synthesize a new single stranded DNA using a PEgRNA editing template that comprises a DNA sequence as a template. In such cases, the PEgRNA is a chimeric or hybrid PEgRNA, and comprising an extension arm comprising a DNA strand. The chimeric or hybrid PEgRNA may comprise an RNA portion (including the spacer and the gRNA core) and a DNA portion (the extension arm comprising the editing template that includes a strand of DNA). In some embodiments, the DNA polymerase is a bacteriophage polymerase, for example, a T4, T7, or phi29 DNA polymerase. In some embodiments, the DNA polymerase is an archaeal polymerase, for example, pol I type archaeal polymerase or a pol II type archaeal polymerase. In some embodiments, the DNA polymerase comprises a thermostable archaeal DNA polymerase. In some embodiments, the DNA polymerase comprises a eubacterial DNA polymerase, for example, Pol I, Pol II, or Pol III polymerase. In some embodiments, the DNA polymerase is a Pol I family DNA polymerase. In some embodiments, the DNA polymerase is a E. coli Pol I DNA polymerase. In some embodiments, the DNA polymerase is a Pol II family DNA polymerase. In some embodiments, the DNA polymerase is a Pyrococcusfuriosus (Pfu) Pol II DNA polymerase. In some embodiments, the DNA Polymerase is a Pol IV family DNA polymerase. In some embodiments, the DNA polymerase is a E. coli Pol IV DNA polymerase. In some embodiments, the DNA polymerase comprises a eukaryotic DNA polymerase. In some embodiments, the DNA polymerase is a Pol-beta DNA polymerase, a Pol-lamda DNA polymerase, a Pol-sigma DNA polymerase, or a Pol-mu DNA polymerase. In some embodiments, the DNA polymerase is a Pol-alpha DNA polymerase. In some embodiments, the DNA polymerase is a POLA1 DNA polymerase. In some embodiments, the DNA polymerase is a POLA2 DNA polymerase. In some embodiments, the DNA polymerase is a Pol-delta DNA polymerase. In some embodiments, the DNA polymerase is a POLD1 DNA polymerase. In some embodiments, the DNA polymerase is a POLD2 DNA polymerase. In some embodiments, the DNA polymerase is a human POLD1 DNA polymerase. In some embodiments, the DNA polymerase is a human POLD2 DNA polymerase. In some embodiments, the DNA polymerase is a POLD3 DNA polymerase. In some embodiments, the DNA polymerase is a POLD4 DNA polymerase. In some embodiments, the DNA polymerase is a Pol-epsilon DNA polymerase. In some embodiments, the DNA polymerase is a POLE1 DNA polymerase. In some embodiments, the DNA polymerase is a POLE2 DNA polymerase. In some embodiments, the DNA polymerase is a POLE3 DNA polymerase. In some embodiments, the DNA polymerase is a Pol-eta (POLH) DNA polymerase. In some embodiments, the DNA polymerase is a Pol-iota (POLI) DNA polymerase. In some embodiments, the DNA polymerase is a Pol-kappa (POLK) DNA polymerase. In some embodiments, the DNA polymerase is a Rev1 DNA polymerase. In some embodiments, the DNA polymerase is a human Rev1 DNA polymerase. In some embodiments, the DNA polymerase is a viral DNA-dependent DNA polymerase. In some embodiments, the DNA polymerase is a B family DNA polymerases. In some embodiments, the DNA polymerase is a herpes simplex virus (HSV) UL30 DNA polymerase. In some embodiments, the DNA polymerase is a cytomegalovirus (CMV) UL54 DNA polymerase.

[0129] In some embodiments, a prime editor comprises an RNA-dependent DNA polymerase domain, for example, a reverse transcriptase (RT). A RT or an RT domain may be a wild type RT domain, a full-length RT domain, or may be a functional mutant, a functional variant, or a functional fragment thereof. An RT or an RT domain of a prime editor may comprise a wild-type RT, or may be engineered or evolved to contain specific amino acid substitutions, truncations, or variants. An engineered RT may comprise sequences or amino acid changes different from a naturally occurring RT. In some embodiments, the engineered RT may have improved reverse transcription activity over a naturally occurring RT or RT domain. In some embodiments, the engineered RT may have improved features over a naturally occurring RT, for example, improved thermostability, reverse transcription efficiency, or target fidelity. In some embodiments, a prime editor comprising the engineered RT has improved prime editing efficiency over a prime editor having a reference naturally occurring RT.

[0130] In some embodiments, a prime editor comprises a virus RT, for example, a retrovirus RT. Non-limiting examples of virus RT include Moloney murine leukemia virus (M-MLV or MMLVRT); human T-cell leukemia virus type 1 (HTLV-1) RT; bovine leukemia virus (BLV) RT; Rous Sarcoma Virus (RSV) RT; human immunodeficiency virus (HIV) RT, M-MFV RT, Avian Sarcoma-Leukosis Virus (ASLV) RT, Rous Sarcoma Virus (RSV) RT, Avian Myeloblastosis Virus (AMV) RT, Avian Erythroblastosis Virus (AEV) Helper Virus MCAV RT, Avian Myelocytomatosis Virus MC29 Helper Virus MCAV RT, Avian Reticuloendotheliosis Virus (REV-T) Helper Virus REV-A RT, Avian Sarcoma Virus UR2 Helper Virus (UR2AV) RT, Avian Sarcoma Virus Y73 Helper Virus YAV RT, Rous Associated Virus (RAV) RT, and Myeloblastosis Associated Virus (MAV) RT, all of which may be suitably used in the methods and composition described herein.

[0131] In some embodiments, the prime editor comprises a wild-type M-MLV RT. An exemplary amino acid sequence of a wild-type M-MLV RT is provided in SEQ ID NO: 5780.

[0132] Exemplary wild type moloney murine leukemia virus reverse transcriptase:

(SEQ ID NO: 5780)
TLNIEDEHRLHETSKEPDVSLGSTWLSDFPQAWAETGGMGLAVRQAPLII
PLKATSTPVSIKQYPMSQEARLGIKPHIQRLLDQGILVPCQSPWNTPLLP
VKKPGTNDYRPVQDLREVNKRVEDIHPTVPNPYNLLSGLPPSHQWYTVLD
LKDAFFCLRLHPTSQPLFAFEWRDPEMGISGQLTWTRLPQGFKNSPTLFD
EALHRDLADFRIQHPDLILLQYVDDLLLAATSELDCQQGTRALLQTLGNL
GYRASAKKAQICQKQVKYLGYLLKEGQRWLTEARKETVMGQPTPKTPRQL
REFLGTAGFCRLWIPGFAEMAAPLYPLTKTGTLFNWGPDQQKAYQEIKQA
LLTAPALGLPDLTKPFELFVDEKQGYAKGVLTQKLGPWRRPVAYLSKKLD
PVAAGWPPCLRMVAAIAVLTKDAGKLTMGQPLVILAPHAVEALVKQPPDR
WLSNARMTHYQALLLDTDRVQFGPVVALNPATLLPLPEEGLQHNCLDILA
EAHGTRPDLTDQPLPDADHTWYTDGSSLLQEGQRKAGAAVTTETEVIWAK
ALPAGTSAQRAELIALTQALKMAEGKKLNVYTDSRYAFATAHIHGEIYRR
RGLLTSEGKEIKNKDEILALLKALFLPKRLSIIHCPGHQKGHSAEARGNR
MADQAARKAAITETPDTSTLLIENSSP.

[0133] In some embodiments, the prime editor comprises a reference M-MLV RT. An exemplary amino acid sequence of a reference M-MLV RT is provided in SEQ ID NO: 5781.

[0134] Exemplary reference moloney murine leukemia virus reverse transcriptase:

(SEQ ID NO: 5781)
TLNIEDEYRLHETSKEPDVSLGSTWLSDFPQAWAETGGMGLAVRQAPLII
PLKATSTPVSIKQYPMSQEARLGIKPHIQRLLDQGILVPCQSPWNTPLLP
VKKPGTNDYRPVQDLREVNKRVEDIHPTVPNPYNLLSGLPPSHQWYTVLD
LKDAFFCLRLHPTSQPLFAFEWRDPEMGISGQLTWTRLPQGFKNSPTLFD
EALHRDLADFRIQHPDLILLQYVDDLLLAATSELDCQQGTRALLQTLGNL
GYRASAKKAQICQKQVKYLGYLLKEGQRWLTEARKETVMGQPTPKTPRQL
REFLGTAGFCRLWIPGFAEMAAPLYPLTKTGTLFNWGPDQQKAYQEIKQA
LLTAPALGLPDLTKPFELFVDEKQGYAKGVLTQKLGPWRRPVAYLSKKLD
PVAAGWPPCLRMVAAIAVLTKDAGKLTMGQPLVILAPHAVEALVKQPPDR
WLSNARMTHYQALLLDTDRVQFGPVVALNPATLLPLPEEGLOHNCLDILA
EAHGTRPDLTDQPLPDADHTWYTDGSSLLQEGQRKAGAAVTTETEVIWAK
ALPAGTSAQRAELIALTQALKMAEGKKLNVYTDSRYAFATAHIHGEIYRR
RGLLTSEGKEIKNKDEILALLKALFLPKRLSIIHCPGHQKGHSAEARGNR
MADQAARKAAITETPDTSTLLIENSSP.

[0135] In some embodiments, the prime editor comprises a M-MLV RT comprising one or more of amino acid substitutions P51X, S67X, E69X, L139X, T197X, D200X, H204X, F209X, E302X, T306X, F309X, W313X, T330X, L345X, L435X, N454X, D524X, E562X, D583X, H594X, L603X, E607X, or D653X as compared to the reference M-MLV RT as set forth in SEQ ID NO: 5781, where X is any amino acid other than the original amino acid in the reference M-MLV RT. In some embodiments, the prime editor comprises a M-MLV RT comprising one or more of amino acid substitutions P51L, S67K, E69K, L139P, T197A, D200N, H204R, F209N, E302K, E302R, T306K, F309N, W313F, T330P, L345G, L435G, N454K, D524G, E562Q, D583N, H594Q, L603W, E607K, and D653N as compared to the reference M-MLV RT as set forth in SEQ ID NO: 5781. In some embodiments, the prime editor comprises a M-MLV RT comprising one or more amino acid substitutions D200N, T330P, L603W, T306K, and W313F as compared to the reference M-MLV RT as set forth in SEQ ID NO: 5781. In some embodiments, the prime editor comprises a M-MLV RT comprising amino acid substitutions D200N, T330P, L603W, T306K, and W313F as compared to the reference M-MLV RT as set forth in SEQ ID NO: 5781. In some embodiments, a prime editor comprising the D200N, T330P, L603W, T306K, and W313F as compared to a reference M-MLV RT may be referred to as a “PE2” prime editor, and the corresponding prime editing system a PE2 prime editing system.

[0136] In some embodiments, a prime editor comprises a eukaryotic RT, for example, a yeast, drosophila, rodent, or primate RT. In some embodiments, the prime editor comprises a Group II intron RT, for example, a. Geobacillus stearothermophilus Group II Intron (GsI-IIC) RT or a Eubacterium rectale group II intron (Eu.re.I2) RT. In some embodiments, the prime editor comprises a retron RT.

[0137] In some embodiments, the DNA-binding domain of a prime editor is a programmable DNA binding domain. In some embodiments, the prime editors provided herein comprise a DNA binding domain comprising an amino acid sequence that is at least 50%, at least 60%, at least 70%, at least 75%, at least 80%, 85%, at least 86%, at least 87%, at least 88%, at least 89%, at least 90%, at least 91%, at least 92%, at least 93%, at least 94%, at least 95%, at least 96%, at least 97%, at least 98%, at least 99%, or 100% identical to any one of the sequences set forth in SEQ ID NOs: 5783-5819. In some embodiments, the DNA binding domain comprises an amino acid sequence that has no more than 1, 2, 3, 4, 5, 6, 7, 8, 9, 10, 11, 12, 13, 14, 15, 16, 17, 18, 19, or 20 differences e.g., mutations e.g., deletions, substitutions and/or insertions compared to any one of the amino acid sequences set forth in SEQ ID NOs: 5783-5819. A programmable DNA binding domain refers to a protein domain that is designed to bind a specific nucleic acid sequence, e.g., a target DNA or a target RNA. In some embodiments, the DNA binding domain is a polynucleotide programmable DNA-binding domain that can associate with a guide polynucleotide (e.g., a PEgRNA) that guides the DNA-binding domain to a specific DNA sequence, e.g., a search target sequence in a target gene. In some embodiments, the DNA binding domain comprises a Clustered Regularly Interspaced Short Palindromic Repeats (CRISPR) Associated (Cas) protein. A Cas protein may comprise any Cas protein described herein or a functional fragment or functional variant thereof. In some embodiments, a DNA binding domain may also comprise a zinc-finger protein domain. In other cases, a DNA binding domain comprises a transcription activator-like effector domain (TALE). In some embodiments, the DNA binding domain comprises a DNA nuclease. For example, the DNA binding domain of a prime editor may comprise an RNA-guided DNA endonuclease, e.g., a Cas protein. In some embodiments, the DNA binding domain comprises a zinc finger nuclease (ZFN) or a transcription activator like effector domain nuclease (TALEN), where one or more zinc finger motifs or TALE motifs are associated with one or more nucleases, e.g., a Fok I nuclease domain.

[0138] In some embodiments, the DNA binding domain comprises a nuclease activity. In some embodiments, the DNA binding domain of a prime editor comprises an endonuclease domain having single strand DNA cleavage activity. For example, the endonuclease domain may comprise a FokI nuclease domain. In some embodiments, the DNA binding domain of a prime editor comprises a nuclease having full nuclease activity. In some embodiments, the DNA-binding domain of a prime editor comprises a nuclease having modified or reduced nuclease activity as compared to a wild type endonuclease domain. For example, the endonuclease domain may comprise one or more amino acid substitutions as compared to a wild type endonuclease domain. In some embodiments, the DNA binding domain of a prime editor has a nickase activity. In some embodiments, the DNA binding domain of a prime editor comprises a Cas protein domain that is a nickase. In some embodiments, compared to a wild type Cas protein, the Cas nickase comprises one or more amino acid substitutions in a nuclease domain that reduces or abolishes its double strand nuclease activity but retains DNA binding activity. In some embodiments, the Cas nickase comprises an amino acid substitution in a HNH domain. In some embodiments, the Cas nickase comprises an amino acid substitution in a RuvC domain.

[0139] In some embodiments, the DNA-binding domain comprises a CRISPR associated protein (Cas protein) domain. A Cas protein may be a Class 1 or a Class 2 Cas protein. A Cas protein can be a type I, type II, type III, type IV, type V Cas protein, or a type VI Cas protein. Non-limiting examples of Cas proteins include Cas1, Cas1B, Cas2, Cas3, Cas4, Cas5, Cas5d, Cas5t, Cas5h, Cas5a, Cas6, Cas7, Cas8, Cas8a, Cas8b, Cas8c, Cas9 (e.g., Csn1 or Csx12), Cas10, Cas10d, Cas12a/Cpf1, Cas12b/C2c1, Cas12c/C2c3, Cas12d/CasY, Cas12e/CasX, Cas12g, Cas12h, Cas12i, Csy1, Csy2, Csy3, Csy4, Cse1, Cse2, Cse3, Cse4, Cse5e, Csc1, Csc2, Csa5, Csn1, Csn2, Csm1, Csm2, Csm3, Csm4, Csm5, Csm6, Cmr1, Cmr3, Cmr4, Cmr5, Cmr6, Csb1, Csb2, Csb3, Csx17, Csx14, Csx10, Csx16, CsaX, Csx3, Csx1, Csx1S, Csx11, Csf1, Csf2, CsO, Csf4, Csd1, Csd2, Cst1, Cst2, Csh1, Csh2, Csa1, Csa2, Csa3, Csa4, Csa5, Type II Cas effector proteins, Type V Cas effector proteins, Type VI Cas effector proteins, CARF, DinG, Cpf1, Cas12b/C2c1, Cas12c/C2c3, Cas12b/C2c1, Cas12c/C2c3, SpCas9 (K855A), eSpCas9 (1.1), SpCas9-HF1, hyper accurate Cas9 variant (HypaCas9), Cas Φ, and homologues, modified or engineered variants, mutants, and/or functional fragments thereof. A Cas protein can be a chimeric Cas protein that is fused to other proteins or polypeptides. A Cas protein can be a chimera of various Cas proteins, for example, comprising domains of Cas proteins from different organisms. A Cas protein, e.g., Cas9, can be from any suitable organism. In some aspects, the organism is Streptococcus pyogenes (S. pyogenes). In some aspects, the organism is Staphylococcus aureus (S. aureus). In some aspects, the organism is Streptococcus thermophilus (S. thermophilus). In some embodiments, the organism is Staphylococcus lugdunensis. Non-limiting examples of suitable organism include Streptococcus pyogenes, Streptococcus thermophilus, Streptococcus sp., Staphylococcus aureus, Nocardiopsis dassonvillei, Streptomyces pristinae spiralis, Streptomyces viridochromo genes, Streptomyces viridochromogenes, Streptosporangium roseum, Streptosporangium roseum, AlicyclobacHlus acidocaldarius, Bacillus pseudomycoides, Bacillus selenitireducens, Exiguobacterium sibiricum, Lactobacillus delbrueckii, Lactobacillus salivarius, Microscilla marina, Burkholderiales bacterium, Polaromonas naphthalenivorans, Polaromonas sp., Crocosphaera watsonii, Cyanothece sp., Microcystis aeruginosa, Pseudomonas aeruginosa, Synechococcus sp., Acetohalobium arabaticum, Ammonifex degensii, Caldicelulosiruptor becscii, Candidatus Desulforudis, Clostridium botulinum, Clostridium difficile, Finegoldia magna, Natranaerobius thermophilus, Pelotomaculum thermopropionicum, Acidithiobacillus caldus, Acidithiobacillus ferrooxidans, Allochromatium vinosum, Marinobacter sp., Nitrosococcus halophilus, Nitrosococcus watsoni, Pseudoalteromonas haloplanktis, Ktedonobacter racemifer, Methanohalobium evestigatum, Anabaena variabilis, Nodularia spumigena, Nostoc sp., Arthrospira maxima, Arthrospira platensis, Arthrospira sp., Lyngbya sp., Microcoleus chthonoplastes, Oscillatoria sp., Petrotoga mobilis, Thermosipho africanus, Acaryochloris marina, Leptotrichia shahii, and Francisella novicida. In some embodiments, the organism is Streptococcus pyogenes (S. pyogenes). In some embodiments, the organism is Staphylococcus aureus (S. aureus). In some embodiments, the organism is Streptococcus thermophilus (S. thermophilus). In some embodiments, the organism is Staphylococcus lugdunensis (S. lugdunensis).

[0140] In some embodiments, a Cas protein can be derived from a variety of bacterial species including, but not limited to, Veillonella atypical, Fusobacterium nucleatum, Filifactor alocis, Solobacterium moorei, Coprococcus catus, Treponema denticola, Peptoniphilus duerdenii, Catenibacterium mitsuokai, Streptococcus mutans, Listeria innocua, Staphylococcus pseudintermedius, Acidaminococcus intestine, Olsenella uli, Oenococcus kitaharae, Bifidobacterium bifidum, Lactobacillus rhamnosus, Lactobacillus gasseri, Finegoldia magna, Mycoplasma mobile, Mycoplasma gallisepticum, Mycoplasma ovipneumoniae, Mycoplasma canis, Mycoplasma synoviae, Eubacterium rectale, Streptococcus thermophilus, Eubacterium dolichum, Lactobacillus coryniformis subsp. Torquens, Ilyobacter polytropus, Ruminococcus albus, Akkermansia muciniphila, Acidothermus cellulolyticus, Bifidobacterium longum, Bifidobacterium dentium, Corynebacterium diphtheria, Elusimicrobium minutum, Nitratifractor salsuginis, Sphaerochaeta globus, Fibrobacter succinogenes subsp. Succinogenes, Bacteroides fragilis, Capnocytophaga ochracea, Rhodopseudomonas palustris, Prevotella micans, Prevotella ruminicola, Flavobacterium columnare, Aminomonas paucivorans, Rhodospirillum rubrum, Candidatus Puniceispirillum marinum, Verminephrobacter eiseniae, Ralstonia syzygii, Dinoroseobacter shibae, Azospirillum, Nitrobacter hamburgensis, Bradyrhizobium, Wolinella succinogenes, Campylobacter jejuni subsp. Jejuni, Helicobacter mustelae, Bacillus cereus, Acidovorax ebreus, Clostridium perfringens, Parvibaculum lavamentivorans, Roseburia intestinalis, Neisseria meningitidis, Pasteurella multocida subsp. Multocida, Sutterella wadsworthensis, proteobacterium, Legionella pneumophila, Parasutterella excrementihominis, Wolinella succinogenes, and Francisella novicida.

[0141] In some embodiments, a Cas protein, e.g., Cas9, can be a wild type or a modified form of a Cas protein. In some embodiments, a Cas protein, e.g., Cas9, can be a nuclease active variant, nuclease inactive variant, a nickase, or a functional variant or functional fragment of a wild type Cas protein. In some embodiments, a Cas protein, e.g., Cas9, can comprise an amino acid change such as a deletion, insertion, substitution, fusion, chimera, or any combination thereof relative to a corresponding wild-type version of the Cas protein. In some embodiments, a Cas protein can be a polypeptide with at least about 50%, 60%, 70%, 80%, 90%, 91%, 92%, 93%, 94%, 95%, 96%, 97%, 98%, 99%, or 100% sequence identity or sequence similarity to a wild type exemplary Cas protein.

[0142] A Cas protein, e.g., Cas9, may comprise one or more domains. Non-limiting examples of Cas domains include, guide nucleic acid recognition and/or binding domain, nuclease domains (e.g., DNase or RNase domains, RuvC, HNH), DNA binding domain, RNA binding domain, helicase domains, protein-protein interaction domains, and dimerization domains. In various embodiments, a Cas protein comprises a guide nucleic acid recognition and/or binding domain can interact with a guide nucleic acid, and one or more nuclease domains that comprise catalytic activity for nucleic acid cleavage.

[0143] In some embodiments, a Cas protein, e.g., Cas9, comprises one or more nuclease domains. A Cas protein can comprise an amino acid sequence having at least about 50%, 60%, 70%, 80%, 90%, 91%, 92%, 93%, 94%, 95%, 96%, 97%, 98%, 99%, or 100% sequence identity to a nuclease domain (e.g., RuvC domain, HNH domain) of a wild-type Cas protein. In some embodiments, a Cas protein comprises a single nuclease domain. For example, a Cpf1 may comprise a RuvC domain but lacks HNH domain. In some embodiments, a Cas protein comprises two nuclease domains, e.g., a Cas9 protein can comprise an HNH nuclease domain and a RuvC nuclease domain.

[0144] In some embodiments, a prime editor comprises a Cas protein, e.g., Cas9, wherein all nuclease domains of the Cas protein are active. In some embodiments, a prime editor comprises a Cas protein having one or more inactive nuclease domains. One or a plurality of the nuclease domains (e.g., RuvC, HNH) of a Cas protein can be deleted or mutated so that they are no longer functional or comprise reduced nuclease activity. In some embodiments, a Cas protein, e.g., Cas9, comprising mutations in a nuclease domain has reduced (e.g. nickase) or abolished nuclease activity while maintaining its ability to target a nucleic acid locus at a search target sequence when complexed with a guide nucleic acid, e.g. a PEgRNA.

[0145] In some embodiments, a prime editor comprises a Cas nickase that can bind to the target gene in a sequence-specific manner and generate a single-strand break at a protospacer within double-stranded DNA in the target gene, but not a double-strand break. For example, the Cas nickase can cleave the edit strand or the non-edit strand of the target gene, but may not cleave both. In some embodiments, a prime editor comprises a Cas nickase comprising two nuclease domains (e.g., Cas9), with one of the two nuclease domains modified to lack catalytic activity or deleted. In some embodiments, the Cas nickase of a prime editor comprises a nuclease inactive RuvC domain and a nuclease active HNH domain. In some embodiments, the Cas nickase of a prime editor comprises a nuclease inactive HNH domain and a nuclease active RuvC domain. In some embodiments, a prime editor comprises a Cas9 nickase having an amino acid substitution in the RuvC domain that reduces or abolishes nuclease activity of the RuvC domain. In some embodiments, the Cas9 nickase comprises a D10X amino acid substitution compared to a wild type S. pyogenes Cas9, wherein X is any amino acid other than D. In some embodiments, a prime editor comprises a Cas9 nickase having an amino acid substitution in the HNH domain that reduces or abolishes nuclease activity of the HNH domain. In some embodiments, the Cas9 nickase comprises a H840X amino acid substitution compared to a wild type S. pyogenes Cas9, wherein X is any amino acid other than H.

[0146] In some embodiments, a prime editor comprises a Cas protein that can bind to the target gene in a sequence-specific manner but lacks or has abolished nuclease activity and may not cleave either strand of a double stranded DNA in a target gene. Abolished activity or lacking activity can refer to an enzymatic activity less than 1%, less than 2%, less than 3%, less than 4%, less than 5%, less than 6%, less than 7%, less than 8%, less than 9%, or less than 10% activity compared to a wild-type exemplary activity (e.g., wild-type Cas9 nuclease activity). In some embodiments, a Cas protein of a prime editor completely lacks nuclease activity. A nuclease, e.g., Cas9, that lacks nuclease activity may be referred to as nuclease inactive or “nuclease dead” (abbreviated by “d”). A nuclease dead Cas protein (e.g., dCas, dCas9) can bind to a target polynucleotide but may not cleave the target polynucleotide. In some embodiments, a dead Cas protein is a dead Cas9 protein. In some embodiments, a prime editor comprises a nuclease dead Cas protein wherein all of the nuclease domains (e.g., both RuvC and HNH nuclease domains in a Cas9 protein; RuvC nuclease domain in a Cpf1 protein) are mutated to lack catalytic activity, or are deleted.

[0147] A Cas protein can be modified. A Cas protein, e.g., Cas9, can be modified to increase or decrease nucleic acid binding affinity, nucleic acid binding specificity, and/or enzymatic activity. Cas proteins can also be modified to change any other activity or property of the protein, such as stability. For example, one or more nuclease domains of the Cas protein can be modified, deleted, or inactivated, or a Cas protein can be truncated to remove domains that are not essential for the function of the protein or to optimize (e.g., enhance or reduce) the activity of the Cas protein.

[0148] A Cas protein can be a fusion protein. For example, a Cas protein can be fused to a cleavage domain, an epigenetic modification domain, a transcriptional regulation domain, or a polymerase domain. A Cas protein can also be fused to a heterologous polypeptide providing increased or decreased stability. The fused domain or heterologous polypeptide can be located at the N-terminus, the C-terminus, or internally within the Cas protein.

[0149] In some embodiments, the Cas protein of a prime editor is a Class 2 Cas protein. In some embodiments, the Cas protein is a type II Cas protein. In some embodiments, the Cas protein is a Cas9 protein, a modified version of a Cas9 protein, a Cas9 protein homolog, mutant, variant, or a functional fragment thereof. As used herein, a Cas9, Cas9 protein, Cas9 polypeptide or a Cas9 nuclease refers to an RNA guided nuclease comprising one or more Cas9 nuclease domains and a Cas9 gRNA binding domain having the ability to bind a guide polynucleotide, e.g., a PEgRNA. A Cas9 protein may refer to a wild type Cas9 protein from any organism or a homolog, ortholog, or paralog from any organisms; any functional mutants or functional variants thereof; or any functional fragments or domains thereof. In some embodiments, a prime editor comprises a full-length Cas9 protein. In some embodiments, the Cas9 protein can generally comprises at least about 50%, 60%, 70%, 80%, 90%, 100% sequence identity to a wild type reference Cas9 protein (e.g., Cas9 from S. pyogenes). In some embodiments, the Cas9 comprises an amino acid change such as a deletion, insertion, substitution, fusion, chimera, or any combination thereof as compared to a wild type reference Cas9 protein.

[0150] In some embodiments, a Cas9 protein may comprise a Cas9 protein from Streptococcus pyogenes (Sp), Staphylococcus aureus (Sa), Streptococcus canis (Sc), Streptococcus thermophilus (St), Staphylococcus lugdunensis (Slu), Neisseria meningitidis (Nm), Campylobacter jejuni (Cj), Francisella novicida (Fn), or Treponema denticola (Td), or any Cas9 homolog or ortholog from an organism known in the art. In some embodiments, a Cas9 polypeptide is a SpCas9 polypeptide. In some embodiments, a Cas9 polypeptide is a SaCas9 polypeptide. In some embodiments, a Cas9 polypeptide is a ScCas9 polypeptide. In some embodiments, a Cas9 polypeptide is a StCas9 polypeptide. In some embodiments, a Cas9 polypeptide is a SluCas9 polypeptide. In some embodiments, a Cas9 polypeptide is a NmCas9 polypeptide. In some embodiments, a Cas9 polypeptide is a CjCas9 polypeptide. In some embodiments, a Cas9 polypeptide is a FnCas9 polypeptide. In some embodiments, a Cas9 polypeptide is a TdCas9 polypeptide. In some embodiments, a Cas9 polypeptide is a chimera comprising domains from two or more of the organisms described herein or those known in the art. In some embodiments, a Cas9 polypeptide is a Cas9 polypeptide from Streptococcus macacae. In some embodiments, a Cas9 polypeptide is a Cas9 polypeptide generated by replacing a PAM interaction domain of a SpCas9 with that of a Streptococcus macacae Cas9 (Spy-mac Cas9).

[0151] In some embodiments, a Cas9 protein comprises a Cas9 protein from Streptococcus pyogenes (Sp), e.g., as according to NC_002737.2:854751-858857 or the protein encoded by UniProt Q99ZW2, e.g., as according to SEQ ID NO: 5783. In some embodiments, the Cas9 protein is a SpCas9. In some embodiments, a SpCas9 can be a wild type SpCas9, a SpCas9 variant, or a nickase SpCas9. In some embodiments, the SpCas9 lacks the N-terminus methionine relative to a corresponding SpCas9 (e.g., wild type SpCas9, a SpCas9 variant or a nickase SpCas9). In some embodiments, a prime editor comprises a Cas9 protein, having an amino acid sequence as according to SEQ ID NO: 5783, not including the N-terminus methionine. In some embodiments, a wild type SpCas9 comprises an amino acid sequence set forth in SEQ ID NO: 5783 or SEQ ID NO: 5784. In some embodiments, a prime editor comprises a Cas9 protein, having an amino acid sequence as according to SEQ ID NO: 5783, not including the N-terminus methionine (e.g., as set forth in SEQ ID NO: 5784). In some embodiments, a prime editor comprises a Cas9 protein comprising one or more mutations (e.g., amino acid substitutions, insertions and/or deletions relative to a corresponding wild type Cas9 protein (e.g., wild type SpCas9). In some embodiments, the Cas9 protein comprising one or mutations relative to a wild type Cas9 protein comprises an amino acid sequence set forth in SEQ ID NO: 5785.

[0152] Exemplary Streptococcus pyogenes Cas9 (SpCas9) amino acid sequences useful in the prime editors disclosed herein are provided below in SEQ ID NOs: 5783-5789.

[0153] Exemplary wild type Streptococcus pyogenes Cas9 (SpCas9) amino acid sequence:

(SEQ ID NO: 5783)
[sequence omitted]

[0154] Exemplary wild type Streptococcus pyogenes Cas9 (SpCas9) amino acid sequence lacking the N-terminus methionine:

(SEQ ID NO: 5784)
DKKYSIGLDIGTNSVGWAVITDEYKVPSKKFKVLGNTDRHSIKKNLIGAL
LFDSGETAEATRLKRTARRRYTRRKNRICYLQEIFSNEMAKVDDSFFHRL
EESFLVEEDKKHERHPIFGNIVDEVAYHEKYPTIYHLRKKLVDSTDKADL
RLIYLALAHMIKFRGHFLIEGDLNPDNSDVDKLFIQLVQTYNQLFEENPI
NASGVDAKAILSARLSKSRRLENLIAQLPGEKKNGLFGNLIALSLGLTPN
FKSNFDLAEDAKLQLSKDTYDDDLDNLLAQIGDQYADLFLAAKNLSDAIL
LSDILRVNTEITKAPLSASMIKRYDEHHQDLTLLKALVRQQLPEKYKEIF
FDQSKNGYAGYIDGGASQEEFYKFIKPILEKMDGTEELLVKLNREDLLRK
QRTFDNGSIPHQIHLGELHAILRRQEDFYPFLKDNREKIEKILTFRIPYY
VGPLARGNSRFAWMTRKSEETITPWNFEEVVDKGASAQSFIERMTNFDKN
LPNEKVLPKHSLLYEYFTVYNELTKVKYVTEGMRKPAFLSGEQKKAIVDL
LFKTNRKVTVKQLKEDYFKKIECFDSVEISGVEDRFNASLGTYHDLLKII
KDKDFLDNEENEDILEDIVLTLTLFEDREMIEERLKTYAHLFDDKVMKQL
KRRRYTGWGRLSRKLINGIRDKQSGKTILDFLKSDGFANRNFMQLIHDDS
LTFKEDIQKAQVSGQGDSLHEHIANLAGSPAIKKGILQTVKVVDELVKVM
GRHKPENIVIEMARENQTTQKGQKNSRERMKRIEEGIKELGSQILKEHPV
ENTQLQNEKLYLYYLQNGRDMYVDQELDINRLSDYDVDHIVPQSFLKDDS
IDNKVLTRSDKNRGKSDNVPSEEVVKKMKNYWRQLLNAKLITQRKFDNLT
KAERGGLSELDKAGFIKRQLVETRQITKHVAQILDSRMNTKYDENDKLIR
EVKVITLKSKLVSDFRKDFQFYKVREINNYHHAHDAYLNAVVGTALIKKY
PKLESEFVYGDYKVYDVRKMIAKSEQEIGKATAKYFFYSNIMNFFKTEIT
LANGEIRKRPLIETNGETGEIVWDKGRDFATVRKVLSMPQVNIVKKTEVQ
TGGFSKESILPKRNSDKLIARKKDWDPKKYGGFDSPTVAYSVLVVAKVEK
GKSKKLKSVKELLGITIMERSSFEKNPIDFLEAKGYKEVKKDLIIKLPKY
SLFELENGRKRMLASAGELQKGNELALPSKYVNFLYLASHYEKLKGSPED
NEQKQLFVEQHKHYLDEIIEQISEFSKRVILADANLDKVLSAYNKHRDKP
IREQAENIIHLFTLTNLGAPAAFKYFDTTIDRKRYTSTKEVLDATLIHQS
ITGLYETRIDLSQLGGD.

[0155] Exemplary Streptococcus pyogenes Cas9 nickase (SpCas9 nickase) amino acid sequence:

(SEQ ID NO: 5785)
MDKKYSIGLDIGTNSVGWAVITDEYKVPSKKFKVLGNTDRHSIKKNLIGA
LLFDSGETAEATRLKRTARRRYTRRKNRICYLQEIFSNEMAKVDDSFFHR
LEESFLVEEDKKHERHPIFGNIVDEVAYHEKYPTIYHLRKKLVDSTDKAD
LRLIYLALAHMIKFRGHFLIEGDLNPDNSDVDKLFIQLVQTYNQLFEENP
INASGVDAKAILSARLSKSRRLENLIAQLPGEKKNGLFGNLIALSLGLTP
NFKSNFDLAEDAKLQLSKDTYDDDLDNLLAQIGDQYADLFLAAKNLSDAI
LLSDILRVNTEITKAPLSASMIKRYDEHHQDLTLLKALVRQQLPEKYKEI
FFDQSKNGYAGYIDGGASQEEFYKFIKPILEKMDGTEELLVKLNREDLLR
KQRTFDNGSIPHQIHLGELHAILRRQEDFYPFLKDNREKIEKILTFRIPY
YVGPLARGNSRFAWMTRKSEETITPWNFEEVVDKGASAQSFIERMTNFDK
NLPNEKVLPKHSLLYEYFTVYNELTKVKYVTEGMRKPAFLSGEQKKAIVD
LLFKTNRKVTVKQLKEDYFKKIECFDSVEISGVEDRFNASLGTYHDLLKI
IKDKDFLDNEENEDILEDIVLTLTLFEDREMIEERLKTYAHLFDDKVMKQ
LKRRRYTGWGRLSRKLINGIRDKQSGKTILDFLKSDGFANRNFMQLIHDD
SLTFKEDIQKAQVSGQGDSLHEHIANLAGSPAIKKGILQTVKVVDELVKV
MGRHKPENIVIEMARENQTTQKGQKNSRERMKRIEEGIKELGSQILKEHP
VENTQLQNEKLYLYYLQNGRDMYVDQELDINRLSDYDVDAIVPQSFLKDD
SIDNKVLTRSDKNRGKSDNVPSEEVVKKMKNYWRQLLNAKLITQRKFDNL
TKAERGGLSELDKAGFIKRQLVETRQITKHVAQILDSRMNTKYDENDKLI
REVKVITLKSKLVSDFRKDFQFYKVREINNYHHAHDAYLNAVVGTALIKK
YPKLESEFVYGDYKVYDVRKMIAKSEQEIGKATAKYFFYSNIMNFFKTEI
TLANGEIRKRPLIETNGETGEIVWDKGRDFATVRKVLSMPQVNIVKKTEV
QTGGFSKESILPKRNSDKLIARKKDWDPKKYGGFDSPTVAYSVLVVAKVE
KGKSKKLKSVKELLGITIMERSSFEKNPIDFLEAKGYKEVKKDLIIKLPK
YSLFELENGRKRMLASAGELQKGNELALPSKYVNFLYLASHYEKLKGSPE
DNEQKQLFVEQHKHYLDEIIEQISEFSKRVILADANLDKVLSAYNKHRDK
PIREQAENIIHLFTLTNLGAPAAFKYFDTTIDRKRYTSTKEVLDATLIHQ
SITGLYETRIDLSQLGGD.

[0156] Exemplary Streptococcus pyogenes Cas9 nickase (SpCas9 nickase) amino acid sequence lacking the N-terminus methionine:

(SEQ ID NO: 5786)
DKKYSIGLDIGTNSVGWAVITDEYKVPSKKFKVLGNTDRHSIKKNLIGAL
LFDSGETAEATRLKRTARRRYTRRKNRICYLQEIFSNEMAKVDDSFFHRL
EESFLVEEDKKHERHPIFGNIVDEVAYHEKYPTIYHLRKKLVDSTDKADL
RLIYLALAHMIKFRGHFLIEGDLNPDNSDVDKLFIQLVQTYNQLFEENPI
NASGVDAKAILSARLSKSRRLENLIAQLPGEKKNGLFGNLIALSLGLTPN
FKSNFDLAEDAKLQLSKDTYDDDLDNLLAQIGDQYADLFLAAKNLSDAIL
LSDILRVNTEITKAPLSASMIKRYDEHHQDLTLLKALVRQQLPEKYKEIF
FDQSKNGYAGYIDGGASQEEFYKFIKPILEKMDGTEELLVKLNREDLLRK
QRTFDNGSIPHQIHLGELHAILRRQEDFYPFLKDNREKIEKILTFRIPYY
VGPLARGNSRFAWMTRKSEETITPWNFEEVVDKGASAQSFIERMTNFDKN
LPNEKVLPKHSLLYEYFTVYNELTKVKYVTEGMRKPAFLSGEQKKAIVDL
LFKTNRKVTVKQLKEDYFKKIECFDSVEISGVEDRFNASLGTYHDLLKII
KDKDFLDNEENEDILEDIVLTLTLFEDREMIEERLKTYAHLFDDKVMKQL
KRRRYTGWGRLSRKLINGIRDKQSGKTILDFLKSDGFANRNFMQLIHDDS
LTFKEDIQKAQVSGQGDSLHEHIANLAGSPAIKKGILQTVKVVDELVKVM
GRHKPENIVIEMARENQTTQKGQKNSRERMKRIEEGIKELGSQILKEHPV
ENTQLQNEKLYLYYLQNGRDMYVDQELDINRLSDYDVDAIVPQSFLKDDS
IDNKVLTRSDKNRGKSDNVPSEEVVKKMKNYWRQLLNAKLITQRKFDNLT
KAERGGLSELDKAGFIKRQLVETRQITKHVAQILDSRMNTKYDENDKLIR
EVKVITLKSKLVSDFRKDFQFYKVREINNYHHAHDAYLNAVVGTALIKKY
PKLESEFVYGDYKVYDVRKMIAKSEQEIGKATAKYFFYSNIMNFFKTEIT
LANGEIRKRPLIETNGETGEIVWDKGRDFATVRKVLSMPQVNIVKKTEVQ
TGGFSKESILPKRNSDKLIARKKDWDPKKYGGFDSPTVAYSVLVVAKVEK
GKSKKLKSVKELLGITIMERSSFEKNPIDFLEAKGYKEVKKDLIIKLPKY
SLFELENGRKRMLASAGELQKGNELALPSKYVNFLYLASHYEKLKGSPED
NEQKQLFVEQHKHYLDEIIEQISEFSKRVILADANLDKVLSAYNKHRDKP
IREQAENIIHLFTLTNLGAPAAFKYFDTTIDRKRYTSTKEVLDATLIHQS
ITGLYETRIDLSQLGGD.

[0157] Exemplary Streptococcus pyogenes Cas9 (SpCas9) variant; SpCas9 NG amino acid sequence

(SEQ ID NO: 5787)
MDKKYSIGLDIGTNSVGWAVITDEYKVPSKKFKVLGNTDRHSIKKNLIGA
LLFDSGETAEATRLKRTARRRYTRRKNRICYLQEIFSNEMAKVDDSFFHR
LEESFLVEEDKKHERHPIFGNIVDEVAYHEKYPTIYHLRKKLVDSTDKAD
LRLIYLALAHMIKFRGHFLIEGDLNPDNSDVDKLFIQLVQTYNQLFEENP
INASGVDAKAILSARLSKSRRLENLIAQLPGEKKNGLFGNLIALSLGLTP
NFKSNFDLAEDAKLQLSKDTYDDDLDNLLAQIGDQYADLFLAAKNLSDAI
LLSDILRVNTEITKAPLSASMIKRYDEHHQDLTLLKALVRQQLPEKYKEI
FFDQSKNGYAGYIDGGASQEEFYKFIKPILEKMDGTEELLVKLNREDLLR
KQRTFDNGSIPHQIHLGELHAILRRQEDFYPFLKDNREKIEKILTFRIPY
YVGPLARGNSRFAWMTRKSEETITPWNFEEVVDKGASAQSFIERMTNFDK
NLPNEKVLPKHSLLYEYFTVYNELTKVKYVTEGMRKPAFLSGEQKKAIVD
LLFKTNRKVTVKQLKEDYFKKIECFDSVEISGVEDRFNASLGTYHDLLKI
IKDKDFLDNEENEDILEDIVLTLTLFEDREMIEERLKTYAHLFDDKVMKQ
LKRRRYTGWGRLSRKLINGIRDKQSGKTILDFLKSDGFANRNFMQLIHDD
SLTFKEDIQKAQVSGQGDSLHEHIANLAGSPAIKKGILQTVKVVDELVKV
MGRHKPENIVIEMARENQTTQKGQKNSRERMKRIEEGIKELGSQILKEHP
VENTQLQNEKLYLYYLQNGRDMYVDQELDINRLSDYDVDHIVPQSFLKDD
SIDNKVLTRSDKNRGKSDNVPSEEVVKKMKNYWRQLLNAKLITQRKFDNL
TKAERGGLSELDKAGFIKRQLVETRQITKHVAQILDSRMNTKYDENDKLI
REVKVITLKSKLVSDFRKDFQFYKVREINNYHHAHDAYLNAVVGTALIKK
YPKLESEFVYGDYKVYDVRKMIAKSEQEIGKATAKYFFYSNIMNFFKTEI
TLANGEIRKRPLIETNGETGEIVWDKGRDFATVRKVLSMPQVNIVKKTEV
QTGGFSKESIRPKRNSDKLIARKKDWDPKKYGGFVSPTVAYSVLVVAKVE
KGKSKKLKSVKELLGITIMERSSFEKNPIDFLEAKGYKEVKKDLIIKLPK
YSLFELENGRKRMLASARFLQKGNELALPSKYVNFLYLASHYEKLKGSPE
DNEQKQLFVEQHKHYLDEIIEQISEFSKRVILADANLDKVLSAYNKHRDK
PIREQAENIIHLFTLTNLGAPRAFKYFDTTIDRKVYRSTKEVLDATLIHQ
SITGLYETRIDLSQLGGD.

[0158] Exemplary Streptococcus pyogenes Cas9 (SpCas9) variant; SpCas9 NG amino acid sequence lacking the N-terminus methionine:

(SEQ ID NO: 5788)
DKKYSIGLDIGTNSVGWAVITDEYKVPSKKFKVLGNTDRHSIKKNLIGAL
LFDSGETAEATRLKRTARRRYTRRKNRICYLQEIFSNEMAKVDDSFFHRL
EESFLVEEDKKHERHPIFGNIVDEVAYHEKYPTIYHLRKKLVDSTDKADL
RLIYLALAHMIKFRGHFLIEGDLNPDNSDVDKLFIQLVQTYNQLFEENPI
NASGVDAKAILSARLSKSRRLENLIAQLPGEKKNGLFGNLIALSLGLTPN
FKSNFDLAEDAKLQLSKDTYDDDLDNLLAQIGDQYADLFLAAKNLSDAIL
LSDILRVNTEITKAPLSASMIKRYDEHHQDLTLLKALVRQQLPEKYKEIF
FDQSKNGYAGYIDGGASQEEFYKFIKPILEKMDGTEELLVKLNREDLLRK
QRTFDNGSIPHQIHLGELHAILRRQEDFYPFLKDNREKIEKILTFRIPYY
VGPLARGNSRFAWMTRKSEETITPWNFEEVVDKGASAQSFIERMTNFDKN
LPNEKVLPKHSLLYEYFTVYNELTKVKYVTEGMRKPAFLSGEQKKAIVDL
LFKTNRKVTVKQLKEDYFKKIECFDSVEISGVEDRFNASLGTYHDLLKII
KDKDFLDNEENEDILEDIVLTLTLFEDREMIEERLKTYAHLFDDKVMKQL
KRRRYTGWGRLSRKLINGIRDKQSGKTILDFLKSDGFANRNFMQLIHDDS
LTFKEDIQKAQVSGQGDSLHEHIANLAGSPAIKKGILQTVKVVDELVKVM
GRHKPENIVIEMARENQTTQKGQKNSRERMKRIEEGIKELGSQILKEHPV
ENTQLQNEKLYLYYLQNGRDMYVDQELDINRLSDYDVDHIVPQSFLKDDS
IDNKVLTRSDKNRGKSDNVPSEEVVKKMKNYWRQLLNAKLITQRKFDNLT
KAERGGLSELDKAGFIKRQLVETRQITKHVAQILDSRMNTKYDENDKLIR
EVKVITLKSKLVSDFRKDFQFYKVREINNYHHAHDAYLNAVVGTALIKKY
PKLESEFVYGDYKVYDVRKMIAKSEQEIGKATAKYFFYSNIMNFFKTEIT
LANGEIRKRPLIETNGETGEIVWDKGRDFATVRKVLSMPQVNIVKKTEVQ
TGGFSKESIRPKRNSDKLIARKKDWDPKKYGGFVSPTVAYSVLVVAKVEK
GKSKKLKSVKELLGITIMERSSFEKNPIDFLEAKGYKEVKKDLIIKLPKY
SLFELENGRKRMLASARFLQKGNELALPSKYVNFLYLASHYEKLKGSPED
NEQKQLFVEQHKHYLDEIIEQISEFSKRVILADANLDKVLSAYNKHRDKP
IREQAENIIHLFTLTNLGAPRAFKYFDTTIDRKVYRSTKEVLDATLIHQS
ITGLYETRIDLSQLGGD.

[0159] Exemplary Streptococcus pyogenes Cas9 (SpCas9) nickase; SpCas9 NG nickase amino acid sequence:

(SEQ ID NO: 5789)
MDKKYSIGLDIGTNSVGWAVITDEYKVPSKKFKVLGNTDRHSIKKNLIGA
LLFDSGETAEATRLKRTARRRYTRRKNRICYLQEIFSNEMAKVDDSFFHR
LEESFLVEEDKKHERHPIFGNIVDEVAYHEKYPTIYHLRKKLVDSTDKAD
LRLIYLALAHMIKFRGHFLIEGDLNPDNSDVDKLFIQLVQTYNQLFEENP
INASGVDAKAILSARLSKSRRLENLIAQLPGEKKNGLFGNLIALSLGLTP
NFKSNFDLAEDAKLQLSKDTYDDDLDNLLAQIGDQYADLFLAAKNLSDAI
LLSDILRVNTEITKAPLSASMIKRYDEHHQDLTLLKALVRQQLPEKYKEI
FFDQSKNGYAGYIDGGASQEEFYKFIKPILEKMDGTEELLVKLNREDLLR
KQRTFDNGSIPHQIHLGELHAILRRQEDFYPFLKDNREKIEKILTFRIPY
YVGPLARGNSRFAWMTRKSEETITPWNFEEVVDKGASAQSFIERMTNFDK
NLPNEKVLPKHSLLYEYFTVYNELTKVKYVTEGMRKPAFLSGEQKKAIVD
LLFKTNRKVTVKQLKEDYFKKIECFDSVEISGVEDRFNASLGTYHDLLKI
IKDKDFLDNEENEDILEDIVLTLTLFEDREMIEERLKTYAHLFDDKVMKQ
LKRRRYTGWGRLSRKLINGIRDKQSGKTILDFLKSDGFANRNFMQLIHDD
SLTFKEDIQKAQVSGQGDSLHEHIANLAGSPAIKKGILQTVKVVDELVKV
MGRHKPENIVIEMARENQTTQKGQKNSRERMKRIEEGIKELGSQILKEHP
VENTQLQNEKLYLYYLQNGRDMYVDQELDINRLSDYDVDAIVPQSFLKDD
SIDNKVLTRSDKNRGKSDNVPSEEVVKKMKNYWRQLLNAKLITQRKFDNL
TKAERGGLSELDKAGFIKRQLVETRQITKHVAQILDSRMNTKYDENDKLI
REVKVITLKSKLVSDFRKDFQFYKVREINNYHHAHDAYLNAVVGTALIKK
YPKLESEFVYGDYKVYDVRKMIAKSEQEIGKATAKYFFYSNIMNFFKTEI
TLANGEIRKRPLIETNGETGEIVWDKGRDFATVRKVLSMPQVNIVKKTEV
QTGGFSKESIRPKRNSDKLIARKKDWDPKKYGGFVSPTVAYSVLVVAKVE
KGKSKKLKSVKELLGITIMERSSFEKNPIDFLEAKGYKEVKKDLIIKLPK
YSLFELENGRKRMLASARFLQKGNELALPSKYVNFLYLASHYEKLKGSPE
DNEQKQLFVEQHKHYLDEIIEQISEFSKRVILADANLDKVLSAYNKHRDK
PIREQAENIIHLFTLTNLGAPRAFKYFDTTIDRKVYRSTKEVLDATLIHQ
SITGLYETRIDLSQLGGD.

[0160] Exemplary Streptococcus pyogenes Cas9 (SpCas9) nickase; SpCas9 NG nickase amino acid sequence lacking the N-terminus methionine:

(SEQ ID NO: 5790)
DKKYSIGLDIGTNSVGWAVITDEYKVPSKKFKVLGNTDRHSIKKNLIGAL
LFDSGETAEATRLKRTARRRYTRRKNRICYLQEIFSNEMAKVDDSFFHRL
EESFLVEEDKKHERHPIFGNIVDEVAYHEKYPTIYHLRKKLVDSTDKADL
RLIYLALAHMIKFRGHFLIEGDLNPDNSDVDKLFIQLVQTYNQLFEENPI
NASGVDAKAILSARLSKSRRLENLIAQLPGEKKNGLFGNLIALSLGLTPN
FKSNFDLAEDAKLQLSKDTYDDDLDNLLAQIGDQYADLFLAAKNLSDAIL
LSDILRVNTEITKAPLSASMIKRYDEHHQDLTLLKALVRQQLPEKYKEIF
FDQSKNGYAGYIDGGASQEEFYKFIKPILEKMDGTEELLVKLNREDLLRK
QRTFDNGSIPHQIHLGELHAILRRQEDFYPFLKDNREKIEKILTFRIPYY
VGPLARGNSRFAWMTRKSEETITPWNFEEVVDKGASAQSFIERMTNFDKN
LPNEKVLPKHSLLYEYFTVYNELTKVKYVTEGMRKPAFLSGEQKKAIVDL
LFKTNRKVTVKQLKEDYFKKIECFDSVEISGVEDRFNASLGTYHDLLKII
KDKDFLDNEENEDILEDIVLTLTLFEDREMIEERLKTYAHLFDDKVMKQL
KRRRYTGWGRLSRKLINGIRDKQSGKTILDFLKSDGFANRNFMQLIHDDS
LTFKEDIQKAQVSGQGDSLHEHIANLAGSPAIKKGILQTVKVVDELVKVM
GRHKPENIVIEMARENQTTQKGQKNSRERMKRIEEGIKELGSQILKEHPV
ENTQLQNEKLYLYYLQNGRDMYVDQELDINRLSDYDVDAIVPQSFLKDDS
IDNKVLTRSDKNRGKSDNVPSEEVVKKMKNYWRQLLNAKLITQRKFDNLT
KAERGGLSELDKAGFIKRQLVETRQITKHVAQILDSRMNTKYDENDKLIR
EVKVITLKSKLVSDFRKDFQFYKVREINNYHHAHDAYLNAVVGTALIKKY
PKLESEFVYGDYKVYDVRKMIAKSEQEIGKATAKYFFYSNIMNFFKTEIT
LANGEIRKRPLIETNGETGEIVWDKGRDFATVRKVLSMPQVNIVKKTEVQ
TGGFSKESIRPKRNSDKLIARKKDWDPKKYGGFVSPTVAYSVLVVAKVEK
GKSKKLKSVKELLGITIMERSSFEKNPIDFLEAKGYKEVKKDLIIKLPKY
SLFELENGRKRMLASARFLQKGNELALPSKYVNFLYLASHYEKLKGSPED
NEQKQLFVEQHKHYLDEIIEQISEFSKRVILADANLDKVLSAYNKHRDKP
IREQAENIIHLFTLTNLGAPRAFKYFDTTIDRKVYRSTKEVLDATLIHQS
ITGLYETRIDLSQLGGD.

[0161] Exemplary Streptococcus pyogenes Cas9 (SpCas9) variant; SpCas9 VRQR amino acid sequence:

(SEQ ID NO: 5791)
MDKKYSIGLDIGTNSVGWAVITDEYKVPSKKFKVLGNTDRHSIKKNLIGA
LLFDSGETAEATRLKRTARRRYTRRKNRICYLQEIFSNEMAKVDDSFFHR
LEESFLVEEDKKHERHPIFGNIVDEVAYHEKYPTIYHLRKKLVDSTDKAD
LRLIYLALAHMIKFRGHFLIEGDLNPDNSDVDKLFIQLVQTYNQLFEENP
INASGVDAKAILSARLSKSRRLENLIAQLPGEKKNGLFGNLIALSLGLTP
NFKSNFDLAEDAKLQLSKDTYDDDLDNLLAQIGDQYADLFLAAKNLSDAI
LLSDILRVNTEITKAPLSASMIKRYDEHHQDLTLLKALVRQQLPEKYKEI
FFDQSKNGYAGYIDGGASQEEFYKFIKPILEKMDGTEELLVKLNREDLLR
KQRTFDNGSIPHQIHLGELHAILRRQEDFYPFLKDNREKIEKILTFRIPY
YVGPLARGNSRFAWMTRKSEETITPWNFEEVVDKGASAQSFIERMTNFDK
NLPNEKVLPKHSLLYEYFTVYNELTKVKYVTEGMRKPAFLSGEQKKAIVD
LLFKTNRKVTVKQLKEDYFKKIECFDSVEISGVEDRFNASLGTYHDLLKI
IKDKDFLDNEENEDILEDIVLTLTLFEDREMIEERLKTYAHLFDDKVMKQ
LKRRRYTGWGRLSRKLINGIRDKQSGKTILDFLKSDGFANRNFMQLIHDD
SLTFKEDIQKAQVSGQGDSLHEHIANLAGSPAIKKGILQTVKVVDELVKV
MGRHKPENIVIEMARENQTTQKGQKNSRERMKRIEEGIKELGSQILKEHP
VENTQLQNEKLYLYYLQNGRDMYVDQELDINRLSDYDVDHIVPQSFLKDD
SIDNKVLTRSDKNRGKSDNVPSEEVVKKMKNYWRQLLNAKLITQRKFDNL
TKAERGGLSELDKAGFIKRQLVETRQITKHVAQILDSRMNTKYDENDKLI
REVKVITLKSKLVSDFRKDFQFYKVREINNYHHAHDAYLNAVVGTALIKK
YPKLESEFVYGDYKVYDVRKMIAKSEQEIGKATAKYFFYSNIMNFFKTEI
TLANGEIRKRPLIETNGETGEIVWDKGRDFATVRKVLSMPQVNIVKKTEV
QTGGFSKESILPKRNSDKLIARKKDWDPKKYGGFVSPTVAYSVLVVAKVE
KGKSKKLKSVKELLGITIMERSSFEKNPIDFLEAKGYKEVKKDLIIKLPK
YSLFELENGRKRMLASARELQKGNELALPSKYVNFLYLASHYEKLKGSPE
DNEQKQLFVEQHKHYLDEIIEQISEFSKRVILADANLDKVLSAYNKHRDK
PIREQAENIIHLFTLTNLGAPAAFKYFDTTIDRKQYRSTKEVLDATLIHQ
SITGLYETRIDLSQLGGD.

[0162] Exemplary Streptococcus pyogenes Cas9 (SpCas9) variant; SpCas9 VRQR amino acid sequence lacking the N-terminus methionine:

(SEQ ID NO: 5792)
DKKYSIGLDIGTNSVGWAVITDEYKVPSKKFKVLGNTDRHSIKKNLIGAL
LFDSGETAEATRLKRTARRRYTRRKNRICYLQEIFSNEMAKVDDSFFHRL
EESFLVEEDKKHERHPIFGNIVDEVAYHEKYPTIYHLRKKLVDSTDKADL
RLIYLALAHMIKFRGHFLIEGDLNPDNSDVDKLFIQLVQTYNQLFEENPI
NASGVDAKAILSARLSKSRRLENLIAQLPGEKKNGLFGNLIALSLGLTPN
FKSNFDLAEDAKLQLSKDTYDDDLDNLLAQIGDQYADLFLAAKNLSDAIL
LSDILRVNTEITKAPLSASMIKRYDEHHQDLTLLKALVRQQLPEKYKEIF
FDQSKNGYAGYIDGGASQEEFYKFIKPILEKMDGTEELLVKLNREDLLRK
QRTFDNGSIPHQIHLGELHAILRRQEDFYPFLKDNREKIEKILTFRIPYY
VGPLARGNSRFAWMTRKSEETITPWNFEEVVDKGASAQSFIERMTNFDKN
LPNEKVLPKHSLLYEYFTVYNELTKVKYVTEGMRKPAFLSGEQKKAIVDL
LFKTNRKVTVKQLKEDYFKKIECFDSVEISGVEDRFNASLGTYHDLLKII
KDKDFLDNEENEDILEDIVLTLTLFEDREMIEERLKTYAHLFDDKVMKQL
KRRRYTGWGRLSRKLINGIRDKQSGKTILDFLKSDGFANRNFMQLIHDDS
LTFKEDIQKAQVSGQGDSLHEHIANLAGSPAIKKGILQTVKVVDELVKVM
GRHKPENIVIEMARENQTTQKGQKNSRERMKRIEEGIKELGSQILKEHPV
ENTQLQNEKLYLYYLQNGRDMYVDQELDINRLSDYDVDHIVPQSFLKDDS
IDNKVLTRSDKNRGKSDNVPSEEVVKKMKNYWRQLLNAKLITQRKFDNLT
KAERGGLSELDKAGFIKRQLVETRQITKHVAQILDSRMNTKYDENDKLIR
EVKVITLKSKLVSDFRKDFQFYKVREINNYHHAHDAYLNAVVGTALIKKY
PKLESEFVYGDYKVYDVRKMIAKSEQEIGKATAKYFFYSNIMNFFKTEIT
LANGEIRKRPLIETNGETGEIVWDKGRDFATVRKVLSMPQVNIVKKTEVQ
TGGFSKESILPKRNSDKLIARKKDWDPKKYGGFVSPTVAYSVLVVAKVEK
GKSKKLKSVKELLGITIMERSSFEKNPIDFLEAKGYKEVKKDLIIKLPKY
SLFELENGRKRMLASARELQKGNELALPSKYVNFLYLASHYEKLKGSPED
NEQKQLFVEQHKHYLDEIIEQISEFSKRVILADANLDKVLSAYNKHRDKP
IREQAENIIHLFTLTNLGAPAAFKYFDTTIDRKQYRSTKEVLDATLIHQS
ITGLYETRIDLSQLGGD.

[0163] Exemplary Streptococcus pyogenes Cas9 (SpCas9) nickase; SpCas9 VRQR nickase amino acid sequence:

(SEQ ID NO: 5793)
MDKKYSIGLDIGTNSVGWAVITDEYKVPSKKFKVLGNTDRHSIKKNLIGA
LLFDSGETAEATRLKRTARRRYTRRKNRICYLQEIFSNEMAKVDDSFFHR
LEESFLVEEDKKHERHPIFGNIVDEVAYHEKYPTIYHLRKKLVDSTDKAD
LRLIYLALAHMIKFRGHFLIEGDLNPDNSDVDKLFIQLVQTYNQLFEENP
INASGVDAKAILSARLSKSRRLENLIAQLPGEKKNGLFGNLIALSLGLTP
NFKSNFDLAEDAKLQLSKDTYDDDLDNLLAQIGDQYADLFLAAKNLSDAI
LLSDILRVNTEITKAPLSASMIKRYDEHHQDLTLLKALVRQQLPEKYKEI
FFDQSKNGYAGYIDGGASQEEFYKFIKPILEKMDGTEELLVKLNREDLLR
KQRTFDNGSIPHQIHLGELHAILRRQEDFYPFLKDNREKIEKILTFRIPY
YVGPLARGNSRFAWMTRKSEETITPWNFEEVVDKGASAQSFIERMTNFDK
NLPNEKVLPKHSLLYEYFTVYNELTKVKYVTEGMRKPAFLSGEQKKAIVD
LLFKTNRKVTVKQLKEDYFKKIECFDSVEISGVEDRFNASLGTYHDLLKI
IKDKDFLDNEENEDILEDIVLTLTLFEDREMIEERLKTYAHLFDDKVMKQ
LKRRRYTGWGRLSRKLINGIRDKQSGKTILDFLKSDGFANRNFMQLIHDD
SLTFKEDIQKAQVSGQGDSLHEHIANLAGSPAIKKGILQTVKVVDELVKV
MGRHKPENIVIEMARENQTTQKGQKNSRERMKRIEEGIKELGSQILKEHP
VENTQLQNEKLYLYYLQNGRDMYVDQELDINRLSDYDVDAIVPQSFLKDD
SIDNKVLTRSDKNRGKSDNVPSEEVVKKMKNYWRQLLNAKLITQRKFDNL
TKAERGGLSELDKAGFIKRQLVETRQITKHVAQILDSRMNTKYDENDKLI
REVKVITLKSKLVSDFRKDFQFYKVREINNYHHAHDAYLNAVVGTALIKK
YPKLESEFVYGDYKVYDVRKMIAKSEQEIGKATAKYFFYSNIMNFFKTEI
TLANGEIRKRPLIETNGETGEIVWDKGRDFATVRKVLSMPQVNIVKKTEV
QTGGFSKESILPKRNSDKLIARKKDWDPKKYGGFVSPTVAYSVLVVAKVE
KGKSKKLKSVKELLGITIMERSSFEKNPIDFLEAKGYKEVKKDLIIKLPK
YSLFELENGRKRMLASARELQKGNELALPSKYVNFLYLASHYEKLKGSPE
DNEQKQLFVEQHKHYLDEIIEQISEFSKRVILADANLDKVLSAYNKHRDK
PIREQAENIIHLFTLTNLGAPAAFKYFDTTIDRKQYRSTKEVLDATLIHQ
SITGLYETRIDLSQLGGD.

[0164] Exemplary Streptococcus pyogenes Cas9 (SpCas9) nickase; SpCas9 VRQR nickase amino acid sequence lacking the N-terminus methionine:

(SEQ ID NO: 5794)
DKKYSIGLDIGTNSVGWAVITDEYKVPSKKFKVLGNTDRHSIKKNLIGAL
LFDSGETAEATRLKRTARRRYTRRKNRICYLQEIFSNEMAKVDDSFFHRL
EESFLVEEDKKHERHPIFGNIVDEVAYHEKYPTIYHLRKKLVDSTDKADL
RLIYLALAHMIKFRGHFLIEGDLNPDNSDVDKLFIQLVQTYNQLFEENPI
NASGVDAKAILSARLSKSRRLENLIAQLPGEKKNGLFGNLIALSLGLTPN
FKSNFDLAEDAKLQLSKDTYDDDLDNLLAQIGDQYADLFLAAKNLSDAIL
LSDILRVNTEITKAPLSASMIKRYDEHHQDLTLLKALVRQQLPEKYKEIF
FDQSKNGYAGYIDGGASQEEFYKFIKPILEKMDGTEELLVKLNREDLLRK
QRTFDNGSIPHQIHLGELHAILRRQEDFYPFLKDNREKIEKILTFRIPYY
VGPLARGNSRFAWMTRKSEETITPWNFEEVVDKGASAQSFIERMTNFDKN
LPNEKVLPKHSLLYEYFTVYNELTKVKYVTEGMRKPAFLSGEQKKAIVDL
LFKTNRKVTVKQLKEDYFKKIECFDSVEISGVEDRFNASLGTYHDLLKII
KDKDFLDNEENEDILEDIVLTLTLFEDREMIEERLKTYAHLFDDKVMKQL
KRRRYTGWGRLSRKLINGIRDKQSGKTILDFLKSDGFANRNFMQLIHDDS
LTFKEDIQKAQVSGQGDSLHEHIANLAGSPAIKKGILQTVKVVDELVKVM
GRHKPENIVIEMARENQTTQKGQKNSRERMKRIEEGIKELGSQILKEHPV
ENTQLQNEKLYLYYLQNGRDMYVDQELDINRLSDYDVDAIVPQSFLKDDS
IDNKVLTRSDKNRGKSDNVPSEEVVKKMKNYWRQLLNAKLITQRKFDNLT
KAERGGLSELDKAGFIKRQLVETRQITKHVAQILDSRMNTKYDENDKLIR
EVKVITLKSKLVSDFRKDFQFYKVREINNYHHAHDAYLNAVVGTALIKKY
PKLESEFVYGDYKVYDVRKMIAKSEQEIGKATAKYFFYSNIMNFFKTEIT
LANGEIRKRPLIETNGETGEIVWDKGRDFATVRKVLSMPQVNIVKKTEVQ
TGGFSKESILPKRNSDKLIARKKDWDPKKYGGFVSPTVAYSVLVVAKVEK
GKSKKLKSVKELLGITIMERSSFEKNPIDFLEAKGYKEVKKDLIIKLPKY
SLFELENGRKRMLASARELQKGNELALPSKYVNFLYLASHYEKLKGSPED
NEQKQLFVEQHKHYLDEIIEQISEFSKRVILADANLDKVLSAYNKHRDKP
IREQAENIIHLFTLTNLGAPAAFKYFDTTIDRKQYRSTKEVLDATLIHQS
ITGLYETRIDLSQLGGD.

[0165] In some embodiments, a prime editor comprises a Cas9 protein as according to any of the SEQ ID NOS 5795-5798 or a variant thereof. In some embodiments, a prime editor comprises a Cas9 protein from Staphylococcus lugdunensis (Slu Cas9) e.g., as according to any of the SEQ ID NOS 5795-5798 or a variant thereof. In some embodiments, a sluCas9 lacks a N-terminal methionine relative to a corresponding sluCas9 (e.g., a wild type sluCas9, a sluCas9 variant, or a nickase sluCas9). In some embodiments, the Cas9 protein is a sluCas9. In some embodiments, a sluCas9 can be a wild type sluCas9, a sluCas9 variant or a nickase sluCas9. In some embodiments, a prime editor comprises a Cas9 protein, having an amino acid sequence as according to SEQ ID NO: 5795, not including the N-terminus methionine. In some embodiments, a wild type SluCas9 comprises an amino acid sequence set forth in SEQ ID NO: 5795 or SEQ ID NO: 5796. In some embodiments, a prime editor comprises a Cas9 protein, having an amino acid sequence as according to SEQ ID NO: 5795, not including the N-terminus methionine (e.g., as set forth in SEQ ID NO: 5796). In some embodiments, a prime editor comprises a Cas9 protein comprising one or more mutations (e.g., amino acid substitutions, insertions and/or deletions relative to a corresponding wild type Cas9 protein (e.g., wild type sluCas9). In some embodiments, the Cas9 protein comprising one or mutations relative to a wild type Cas9 protein comprises an amino acid sequence set forth in SEQ ID NO: 5797 or 5798.

[0166] Exemplary Staphylococcus lugdunensis Cas9 (SluCas9) amino acid sequences useful in the prime editors disclosed herein are provided below in SEQ ID NOs: 5795-5798.

[0167] Exemplary Staphylococcus lugdunensis amino acid sequence WP_002460848.1.

[0168] Exemplary wild type Staphylococcus lugdunensis Cas9 (SluCas9) amino acid sequence:

(SEQ ID NO: 5795)
MNQKFILGLDIGITSVGYGLIDYETKNIIDAGVRLFPEANVENNEGRRSK
RGSRRLKRRRIHRLERVKKLLEDYNLLDQSQIPQSTNPYAIRVKGLSEAL
SKDELVIALLHIAKRRGIHKIDVIDSNDDVGNELSTKEQLNKNSKLLKDK
FVCQIQLERMNEGQVRGEKNRFKTADIIKEIIQLLNVQKNFHQLDENFIN
KYIELVEMRREYFEGPGKGSPYGWEGDPKAWYETLMGHCTYFPDELRSVK
YAYSADLFNALNDLNNLVIQRDGLSKLEYHEKYHIIENVFKQKKKPTLKQ
IANEINVNPEDIKGYRITKSGKPQFTEFKLYHDLKSVLFDQSILENEDVL
DQIAEILTIYQDKDSIKSKLTELDILLNEEDKENIAQLTGYTGTHRLSLK
CIRLVLEEQWYSSRNQMEIFTHLNIKPKKINLTAANKIPKAMIDEFILSP
VVKRTFGQAINLINKIIEKYGVPEDIIIELARENNSKDKQKFINEMQKKN
ENTRKRINEIIGKYGNQNAKRLVEKIRLHDEQEGKCLYSLESIPLEDLLN
NPNHYEVDHIIPRSVSFDNSYHNKVLVKQSENSKKSNLTPYQYFNSGKSK
LSYNQFKQHILNLSKSQDRISKKKKEYLLEERDINKFEVQKEFINRNLVD
TRYATRELTNYLKAYFSANNMNVKVKTINGSFTDYLRKVWKFKKERNHGY
KHHAEDALIIANADFLFKENKKLKAVNSVLEKPEIESKQLDIQVDSEDNY
SEMFIIPKQVQDIKDFRNFKYSHRVDKKPNRQLINDTLYSTRKKDNSTYI
VQTIKDIYAKDNTTLKKQFDKSPEKFLMYQHDPRTFEKLEVIMKQYANEK
NPLAKYHEETGEYLTKYSKKNNGPIVKSLKYIGNKLGSHLDVTHQFKSST
KKLVKLSIKPYRFDVYLTDKGYKFITISYLDVLKKDNYYYIPEQKYDKLK
LGKAIDKNAKFIASFYKNDLIKLDGEIYKIIGVNSDTRNMIELDLPDIRY
KEYCELNNIKGEPRIKKTIGKKVNSIEKLTTDVLGNVFTNTQYTKPQLLF
KRGN.

[0169] Exemplary wild type Staphylococcus lugdunensis Cas9 (SluCas9) amino acid sequence lacking N-terminus methionine:

(SEQ ID NO: 5796)
NQKFILGLDIGITSVGYGLIDYETKNIIDAGVRLFPEANVENNEGRRSKR
GSRRLKRRRIHRLERVKKLLEDYNLLDQSQIPQSTNPYAIRVKGLSEALS
KDELVIALLHIAKRRGIHKIDVIDSNDDVGNELSTKEQLNKNSKLLKDKF
VCQIQLERMNEGQVRGEKNRFKTADIIKEIIQLLNVQKNFHOLDENFINK
YIELVEMRREYFEGPGKGSPYGWEGDPKAWYETLMGHCTYFPDELRSVKY
AYSADLFNALNDLNNLVIQRDGLSKLEYHEKYHIIENVFKQKKKPTLKQI
ANEINVNPEDIKGYRITKSGKPQFTEFKLYHDLKSVLFDQSILENEDVLD
QIAEILTIYQDKDSIKSKLTELDILLNEEDKENIAQLTGYTGTHRLSLKC
IRLVLEEQWYSSRNQMEIFTHLNIKPKKINLTAANKIPKAMIDEFILSPV
VKRTFGQAINLINKIIEKYGVPEDIIIELARENNSKDKQKFINEMQKKNE
NTRKRINEIIGKYGNQNAKRLVEKIRLHDEQEGKCLYSLESIPLEDLLNN
PNHYEVDHIIPRSVSFDNSYHNKVLVKQSENSKKSNLTPYQYFNSGKSKL
SYNQFKQHILNLSKSQDRISKKKKEYLLEERDINKFEVQKEFINRNLVDT
RYATRELTNYLKAYFSANNMNVKVKTINGSFTDYLRKVWKFKKERNHGYK
HHAEDALIIANADFLFKENKKLKAVNSVLEKPEIESKQLDIQVDSEDNYS
EMFIIPKQVQDIKDFRNFKYSHRVDKKPNRQLINDTLYSTRKKDNSTYIV
QTIKDIYAKDNTTLKKQFDKSPEKFLMYQHDPRTFEKLEVIMKQYANEKN
PLAKYHEETGEYLTKYSKKNNGPIVKSLKYIGNKLGSHLDVTHQFKSSTK
KLVKLSIKPYRFDVYLTDKGYKFITISYLDVLKKDNYYYIPEQKYDKLKL
GKAIDKNAKFIASFYKNDLIKLDGEIYKIIGVNSDTRNMIELDLPDIRYK
EYCELNNIKGEPRIKKTIGKKVNSIEKLTTDVLGNVFTNTQYTKPQLLFK
RGN.

[0170] Exemplary Staphylococcus lugdunensis Cas9 (SluCas9) nickase amino acid sequence:

(SEQ ID NO: 5797)
MNQKFILGLDIGITSVGYGLIDYETKNIIDAGVRLFPEANVENNEGRRSK
RGSRRLKRRRIHRLERVKKLLEDYNLLDQSQIPQSTNPYAIRVKGLSEAL
SKDELVIALLHIAKRRGIHKIDVIDSNDDVGNELSTKEQLNKNSKLLKDK
FVCQIQLERMNEGQVRGEKNRFKTADIIKEIIQLLNVQKNFHQLDENFIN
KYIELVEMRREYFEGPGKGSPYGWEGDPKAWYETLMGHCTYFPDELRSVK
YAYSADLFNALNDLNNLVIQRDGLSKLEYHEKYHIIENVFKQKKKPTLKQ
IANEINVNPEDIKGYRITKSGKPQFTEFKLYHDLKSVLFDQSILENEDVL
DQIAEILTIYQDKDSIKSKLTELDILLNEEDKENIAQLTGYTGTHRLSLK
CIRLVLEEQWYSSRNQMEIFTHLNIKPKKINLTAANKIPKAMIDEFILSP
VVKRTFGQAINLINKIIEKYGVPEDIIIELARENNSKDKQKFINEMQKKN
ENTRKRINEIIGKYGNQNAKRLVEKIRLHDEQEGKCLYSLESIPLEDLLN
NPNHYEVDHIIPRSVSFDNSYHNKVLVKQSEASKKSNLTPYQYFNSGKSK
LSYNQFKQHILNLSKSQDRISKKKKEYLLEERDINKFEVQKEFINRNLVD
TRYATRELTNYLKAYFSANNMNVKVKTINGSFTDYLRKVWKFKKERNHGY
KHHAEDALIIANADFLFKENKKLKAVNSVLEKPEIESKQLDIQVDSEDNY
SEMFIIPKQVQDIKDFRNFKYSHRVDKKPNRQLINDTLYSTRKKDNSTYI
VQTIKDIYAKDNTTLKKQFDKSPEKFLMYQHDPRTFEKLEVIMKQYANEK
NPLAKYHEETGEYLTKYSKKNNGPIVKSLKYIGNKLGSHLDVTHQFKSST
KKLVKLSIKPYRFDVYLTDKGYKFITISYLDVLKKDNYYYIPEQKYDKLK
LGKAIDKNAKFIASFYKNDLIKLDGEIYKIIGVNSDTRNMIELDLPDIRY
KEYCELNNIKGEPRIKKTIGKKVNSIEKLTTDVLGNVFTNTQYTKPQLLF
KRGN.

[0171] Exemplary Staphylococcus lugdunensis Cas9 (SluCas9) nickase amino acid sequence lacking N-terminus methionine:

(SEQ ID NO: 5798)
NQKFILGLDIGITSVGYGLIDYETKNIIDAGVRLFPEANVENNEGRRSKR
GSRRLKRRRIHRLERVKKLLEDYNLLDQSQIPQSTNPYAIRVKGLSEALS
KDELVIALLHIAKRRGIHKIDVIDSNDDVGNELSTKEQLNKNSKLLKDKF
VCQIQLERMNEGQVRGEKNRFKTADIIKEIIQLLNVQKNFHOLDENFINK
YIELVEMRREYFEGPGKGSPYGWEGDPKAWYETLMGHCTYFPDELRSVKY
AYSADLFNALNDLNNLVIQRDGLSKLEYHEKYHIIENVFKQKKKPTLKQI
ANEINVNPEDIKGYRITKSGKPQFTEFKLYHDLKSVLFDQSILENEDVLD
QIAEILTIYQDKDSIKSKLTELDILLNEEDKENIAQLTGYTGTHRLSLKC
IRLVLEEQWYSSRNQMEIFTHLNIKPKKINLTAANKIPKAMIDEFILSPV
VKRTFGQAINLINKIIEKYGVPEDIIIELARENNSKDKQKFINEMQKKNE
NTRKRINEIIGKYGNQNAKRLVEKIRLHDEQEGKCLYSLESIPLEDLLNN
PNHYEVDHIIPRSVSFDNSYHNKVLVKQSEASKKSNLTPYQYFNSGKSKL
SYNQFKQHILNLSKSQDRISKKKKEYLLEERDINKFEVQKEFINRNLVDT
RYATRELTNYLKAYFSANNMNVKVKTINGSFTDYLRKVWKFKKERNHGYK
HHAEDALIIANADFLFKENKKLKAVNSVLEKPEIESKQLDIQVDSEDNYS
EMFIIPKQVQDIKDFRNFKYSHRVDKKPNRQLINDTLYSTRKKDNSTYIV
QTIKDIYAKDNTTLKKQFDKSPEKFLMYQHDPRTFEKLEVIMKQYANEKN
PLAKYHEETGEYLTKYSKKNNGPIVKSLKYIGNKLGSHLDVTHQFKSSTK
KLVKLSIKPYRFDVYLTDKGYKFITISYLDVLKKDNYYYIPEQKYDKLKL
GKAIDKNAKFIASFYKNDLIKLDGEIYKIIGVNSDTRNMIELDLPDIRYK
EYCELNNIKGEPRIKKTIGKKVNSIEKLTTDVLGNVFTNTQYTKPQLLFK
RGN.

[0172] In some embodiments, a prime editor comprises a Cas9 protein from Staphylococcus aureus (SaCas9) e.g., as according to any of the SEQ ID NOS 5799-5800, 5802, 5803, or a variant thereof. In some embodiments, a SaCas9 may lack a N-terminal methionine. In some embodiments, a SaCas9 may comprise a mutation.

[0173] In some embodiments, a prime editor comprises a Cas9 protein as according to any of the SEQ ID NOS 5799-5800, 5802, 5803 or a variant thereof. In some embodiments, a SaCas9 lacks a N-terminal methionine relative to a corresponding SaCas9 (e.g., a wild type SaCas9, a SaCas9 variant, or a nickase SaCas9). In some embodiments, the Cas9 protein is a SaCas9. In some embodiments, a SaCas9 can be a wild type SaCas9, a SaCas9 variant or a nickase SaCas9. In some embodiments, a prime editor comprises a Cas9 protein, having an amino acid sequence as according to SEQ ID NO: 5799, not including the N-terminus methionine. In some embodiments, a wild type SaCas9 comprises an amino acid sequence set forth in SEQ ID NO: 5799 or SEQ ID NO: 5800. In some embodiments, a prime editor comprises a Cas9 protein, having an amino acid sequence as according to SEQ ID NO: 5799, not including the N-terminus methionine (e.g., as set forth in SEQ ID NO: 5800). In some embodiments, a prime editor comprises a Cas9 protein comprising one or more mutations (e.g., amino acid substitutions, insertions and/or deletions relative to a corresponding wild type Cas9 protein (e.g., wild type SaCas9). In some embodiments, the Cas9 protein comprising one or mutations relative to a wild type Cas9 protein comprises an amino acid sequence set forth in SEQ ID NO: 5802 or 5803. Exemplary SaCas9 amino acid sequences useful in the prime editors disclosed herein are provided below in SEQ ID NOs: 5799, 5800, 5802, 5803.

[0174] Exemplary wild type Staphylococcus aureus Cas9 (SaCas9) amino acid sequence:

(SEQ ID NO: 5799)
MKRNYILGLDIGITSVGYGIIDYETRDVIDAGVRLFKEANVENNEGRRSK
RGARRLKRRRRHRIQRVKKLLFDYNLLTDHSELSGINPYEARVKGLSQKL
SEEEFSAALLHLAKRRGVHNVNEVEEDTGNELSTKEQISRNSKALEEKYV
AELQLERLKKDGEVRGSINRFKTSDYVKEAKQLLKVQKAYHQLDQSFIDT
YIDLLETRRTYYEGPGEGSPFGWKDIKEWYEMLMGHCTYFPEELRSVKYA
YNADLYNALNDLNNLVITRDENEKLEYYEKFQIIENVFKQKKKPTLKQIA
KEILVNEEDIKGYRVTSTGKPEFTNLKVYHDIKDITARKEIIENAELLDQ
IAKILTIYQSSEDIQEELTNLNSELTQEEIEQISNLKGYTGTHNLSLKAI
NLILDELWHTNDNQIAIFNRLKLVPKKVDLSQQKEIPTTLVDDFILSPVV
KRSFIQSIKVINAIIKKYGLPNDIIIELAREKNSKDAQKMINEMQKRNRQ
TNERIEEIIRTTGKENAKYLIEKIKLHDMQEGKCLYSLEAIPLEDLLNNP
FNYEVDHIIPRSVSFDNSFNNKVLVKQEENSKKGNRTPFQYLSSSDSKIS
YETFKKHILNLAKGKGRISKTKKEYLLEERDINRFSVQKDFINRNLVDTR
YATRGLMNLLRSYFRVNNLDVKVKSINGGFTSFLRRKWKFKKERNKGYKH
HAEDALIIANADFIFKEWKKLDKAKKVMENQMFEEKQAESMPEIETEQEY
KEIFITPHQIKHIKDFKDYKYSHRVDKKPNRELINDTLYSTRKDDKGNTL
IVNNLNGLYDKDNDKLKKLINKSPEKLLMYHHDPQTYQKLKLIMEQYGDE
KNPLYKYYEETGNYLTKYSKKDNGPVIKKIKYYGNKLNAHLDITDDYPNS
RNKVVKLSLKPYRFDVYLDNGVYKFVTVKNLDVIKKENYYEVNSKCYEEA
KKLKKISNQAEFIASFYNNDLIKINGELYRVIGVNNDLLNRIEVNMIDIT
YREYLENMNDKRPPRIIKTIASKTQSIKKYSTDILGNLYEVKSKKHPQII
KKG.

[0175] Exemplary wild type Staphylococcus aureus Cas9 (SaCas9) amino acid sequence lacking N-terminus methionine:

(SEQ ID NO: 5800)
KRNYILGLDIGITSVGYGIIDYETRDVIDAGVRLFKEANVENNEGRRSKR
GARRLKRRRRHRIQRVKKLLFDYNLLTDHSELSGINPYEARVKGLSQKLS
EEEFSAALLHLAKRRGVHNVNEVEEDTGNELSTKEQISRNSKALEEKYVA
ELQLERLKKDGEVRGSINRFKTSDYVKEAKQLLKVQKAYHQLDQSFIDTY
IDLLETRRTYYEGPGEGSPFGWKDIKEWYEMLMGHCTYFPEELRSVKYAY
NADLYNALNDLNNLVITRDENEKLEYYEKFQIIENVFKQKKKPTLKQIAK
EILVNEEDIKGYRVTSTGKPEFTNLKVYHDIKDITARKEIIENAELLDQI
AKILTIYQSSEDIQEELTNLNSELTQEEIEQISNLKGYTGTHNLSLKAIN
LILDELWHTNDNQIAIFNRLKLVPKKVDLSQQKEIPTTLVDDFILSPVVK
RSFIQSIKVINAIIKKYGLPNDIIIELAREKNSKDAQKMINEMQKRNRQT
NERIEEIIRTTGKENAKYLIEKIKLHDMQEGKCLYSLEAIPLEDLLNNPF
NYEVDHIIPRSVSFDNSFNNKVLVKQEENSKKGNRTPFQYLSSSDSKISY
ETFKKHILNLAKGKGRISKTKKEYLLEERDINRFSVQKDFINRNLVDTRY
ATRGLMNLLRSYFRVNNLDVKVKSINGGFTSFLRRKWKFKKERNKGYKHH
AEDALIIANADFIFKEWKKLDKAKKVMENQMFEEKQAESMPEIETEQEYK
EIFITPHQIKHIKDFKDYKYSHRVDKKPNRELINDTLYSTRKDDKGNTLI
VNNLNGLYDKDNDKLKKLINKSPEKLLMYHHDPQTYQKLKLIMEQYGDEK
NPLYKYYEETGNYLTKYSKKDNGPVIKKIKYYGNKLNAHLDITDDYPNSR
NKVVKLSLKPYRFDVYLDNGVYKFVTVKNLDVIKKENYYEVNSKCYEEAK
KLKKISNQAEFIASFYNNDLIKINGELYRVIGVNNDLLNRIEVNMIDITY
REYLENMNDKRPPRIIKTIASKTQSIKKYSTDILGNLYEVKSKKHPQIIK
KG.

[0176] Exemplary Staphylococcus aureus Cas9 (SaCas9) nickase amino acid sequence:

(SEQ ID NO: 5802)
MKRNYILGLDIGITSVGYGIIDYETRDVIDAGVRLFKEANVENNEGRRSK
RGARRLKRRRRHRIQRVKKLLFDYNLLTDHSELSGINPYEARVKGLSQKL
SEEEFSAALLHLAKRRGVHNVNEVEEDTGNELSTKEQISRNSKALEEKYV
AELQLERLKKDGEVRGSINRFKTSDYVKEAKQLLKVQKAYHQLDQSFIDT
YIDLLETRRTYYEGPGEGSPFGWKDIKEWYEMLMGHCTYFPEELRSVKYA
YNADLYNALNDLNNLVITRDENEKLEYYEKFQIIENVFKQKKKPTLKQIA
KEILVNEEDIKGYRVTSTGKPEFTNLKVYHDIKDITARKEIIENAELLDQ
IAKILTIYQSSEDIQEELTNLNSELTQEEIEQISNLKGYTGTHNLSLKAI
NLILDELWHTNDNQIAIFNRLKLVPKKVDLSQQKEIPTTLVDDFILSPVV
KRSFIQSIKVINAIIKKYGLPNDIIIELAREKNSKDAQKMINEMQKRNRQ
TNERIEEIIRTTGKENAKYLIEKIKLHDMQEGKCLYSLEAIPLEDLLNNP
FNYEVDHIIPRSVSFDNSFNNKVLVKQEEASKKGNRTPFQYLSSSDSKIS
YETFKKHILNLAKGKGRISKTKKEYLLEERDINRFSVQKDFINRNLVDTR
YATRGLMNLLRSYFRVNNLDVKVKSINGGFTSFLRRKWKFKKERNKGYKH
HAEDALIIANADFIFKEWKKLDKAKKVMENQMFEEKQAESMPEIETEQEY
KEIFITPHQIKHIKDFKDYKYSHRVDKKPNRELINDTLYSTRKDDKGNTL
IVNNLNGLYDKDNDKLKKLINKSPEKLLMYHHDPQTYQKLKLIMEQYGDE
KNPLYKYYEETGNYLTKYSKKDNGPVIKKIKYYGNKLNAHLDITDDYPNS
RNKVVKLSLKPYRFDVYLDNGVYKFVTVKNLDVIKKENYYEVNSKCYEEA
KKLKKISNQAEFIASFYNNDLIKINGELYRVIGVNNDLLNRIEVNMIDIT
YREYLENMNDKRPPRIIKTIASKTQSIKKYSTDILGNLYEVKSKKHPQII
KKG.

[0177] Exemplary Staphylococcus aureus Cas9 (SaCas9) nickase amino acid sequence lacking N-terminus methionine:

(SEQ ID NO: 5803)
KRNYILGLDIGITSVGYGIIDYETRDVIDAGVRLFKEANVENNEGRRSKR
GARRLKRRRRHRIQRVKKLLFDYNLLTDHSELSGINPYEARVKGLSQKLS
EEEFSAALLHLAKRRGVHNVNEVEEDTGNELSTKEQISRNSKALEEKYVA
ELQLERLKKDGEVRGSINRFKTSDYVKEAKQLLKVQKAYHQLDQSFIDTY
IDLLETRRTYYEGPGEGSPFGWKDIKEWYEMLMGHCTYFPEELRSVKYAY
NADLYNALNDLNNLVITRDENEKLEYYEKFQIIENVFKQKKKPTLKQIAK
EILVNEEDIKGYRVTSTGKPEFTNLKVYHDIKDITARKEIIENAELLDQI
AKILTIYQSSEDIQEELTNLNSELTQEEIEQISNLKGYTGTHNLSLKAIN
LILDELWHTNDNQIAIFNRLKLVPKKVDLSQQKEIPTTLVDDFILSPVVK
RSFIQSIKVINAIIKKYGLPNDIIIELAREKNSKDAQKMINEMQKRNRQT
NERIEEIIRTTGKENAKYLIEKIKLHDMQEGKCLYSLEAIPLEDLLNNPF
NYEVDHIIPRSVSFDNSFNNKVLVKQEEASKKGNRTPFQYLSSSDSKISY
ETFKKHILNLAKGKGRISKTKKEYLLEERDINRFSVQKDFINRNLVDTRY
ATRGLMNLLRSYFRVNNLDVKVKSINGGFTSFLRRKWKFKKERNKGYKHH
AEDALIIANADFIFKEWKKLDKAKKVMENQMFEEKQAESMPEIETEQEYK
EIFITPHQIKHIKDFKDYKYSHRVDKKPNRELINDTLYSTRKDDKGNTLI
VNNLNGLYDKDNDKLKKLINKSPEKLLMYHHDPQTYQKLKLIMEQYGDEK
NPLYKYYEETGNYLTKYSKKDNGPVIKKIKYYGNKLNAHLDITDDYPNSR
NKVVKLSLKPYRFDVYLDNGVYKFVTVKNLDVIKKENYYEVNSKCYEEAK
KLKKISNQAEFIASFYNNDLIKINGELYRVIGVNNDLLNRIEVNMIDITY
REYLENMNDKRPPRIIKTIASKTQSIKKYSTDILGNLYEVKSKKHPQIIK
KG.

[0178] In some embodiments, a prime editor comprises a Cas protein, e.g., Cas9 variant, containing modifications that allow altered PAM recognition. Exemplary Cas9 variants with altered PAM specificities that are useful in the Prime editors of the disclosure are provided below in SEQ ID NOs 5804-5819.

[0179] Exemplary Streptococcus pyogenes Cas9 variant (SpRY) amino acid sequence:

(SEQ ID NO: 5804)
KRNYILGLDIGITSVGYGIIDYETRDVIDAGVRLFKEANVENNEGRRSKR
GARRLKRRRRHRIQRVKKLLFDYNLLTDHSELSGINPYEARVKGLSQKLS
EEEFSAALLHLAKRRGVHNVNEVEEDTGNELSTKEQISRNSKALEEKYVA
ELQLERLKKDGEVRGSINRFKTSDYVKEAKQLLKVQKAYHQLDQSFIDTY
IDLLETRRTYYEGPGEGSPFGWKDIKEWYEMLMGHCTYFPEELRSVKYAY
NADLYNALNDLNNLVITRDENEKLEYYEKFQIIENVFKQKKKPTLKQIAK
EILVNEEDIKGYRVTSTGKPEFTNLKVYHDIKDITARKEIIENAELLDQI
AKILTIYQSSEDIQEELTNLNSELTQEEIEQISNLKGYTGTHNLSLKAIN
LILDELWHTNDNQIAIFNRLKLVPKKVDLSQQKEIPTTLVDDFILSPVVK
RSFIQSIKVINAIIKKYGLPNDIIIELAREKNSKDAQKMINEMQKRNRQT
NERIEEIIRTTGKENAKYLIEKIKLHDMQEGKCLYSLEAIPLEDLLNNPF
NYEVDHIIPRSVSFDNSFNNKVLVKQEEASKKGNRTPFQYLSSSDSKISY
ETFKKHILNLAKGKGRISKTKKEYLLEERDINRFSVQKDFINRNLVDTRY
ATRGLMNLLRSYFRVNNLDVKVKSINGGFTSFLRRKWKFKKERNKGYKHH
AEDALIIANADFIFKEWKKLDKAKKVMENQMFEEKQAESMPEIETEQEYK
EIFITPHQIKHIKDFKDYKYSHRVDKKPNRELINDTLYSTRKDDKGNTLI
VNNLNGLYDKDNDKLKKLINKSPEKLLMYHHDPQTYQKLKLIMEQYGDEK
NPLYKYYEETGNYLTKYSKKDNGPVIKKIKYYGNKLNAHLDITDDYPNSR
NKVVKLSLKPYRFDVYLDNGVYKFVTVKNLDVIKKENYYEVNSKCYEEAK
KLKKISNQAEFIASFYNNDLIKINGELYRVIGVNNDLLNRIEVNMIDITY
REYLENMNDKRPPRIIKTIASKTQSIKKYSTDILGNLYEVKSKKHPQIIK
KG.

[0180] Exemplary Streptococcus pyogenes Cas9 variant (SpRY) amino acid sequence lacking N-terminus methionine:

(SEQ ID NO: 5805)
MDKKYSIGLDIGTNSVGWAVITDEYKVPSKKFKVLGNTDRHSIKKNLIGA
LLFDSGETAERTRLKRTARRRYTRRKNRICYLQEIFSNEMAKVDDSFFHR
LEESFLVEEDKKHERHPIFGNIVDEVAYHEKYPTIYHLRKKLVDSTDKAD
LRLIYLALAHMIKFRGHFLIEGDLNPDNSDVDKLFIQLVQTYNQLFEENP
INASGVDAKAILSARLSKSRRLENLIAQLPGEKKNGLFGNLIALSLGLTP
NFKSNFDLAEDAKLQLSKDTYDDDLDNLLAQIGDQYADLFLAAKNLSDAI
LLSDILRVNTEITKAPLSASMIKRYDEHHQDLTLLKALVRQQLPEKYKEI
FFDQSKNGYAGYIDGGASQEEFYKFIKPILEKMDGTEELLVKLNREDLLR
KQRTFDNGSIPHQIHLGELHAILRRQEDFYPFLKDNREKIEKILTFRIPY
YVGPLARGNSRFAWMTRKSEETITPWNFEEVVDKGASAQSFIERMTNFDK
NLPNEKVLPKHSLLYEYFTVYNELTKVKYVTEGMRKPAFLSGEQKKAIVD
LLFKTNRKVTVKQLKEDYFKKIECFDSVEISGVEDRFNASLGTYHDLLKI
IKDKDFLDNEENEDILEDIVLTLTLFEDREMIEERLKTYAHLFDDKVMKQ
LKRRRYTGWGRLSRKLINGIRDKQSGKTILDFLKSDGFANRNFMQLIHDD
SLTFKEDIQKAQVSGQGDSLHEHIANLAGSPAIKKGILQTVKVVDELVKV
MGRHKPENIVIEMARENQTTQKGQKNSRERMKRIEEGIKELGSQILKEHP
VENTQLQNEKLYLYYLQNGRDMYVDQELDINRLSDYDVDHIVPQSFLKDD
SIDNKVLTRSDKNRGKSDNVPSEEVVKKMKNYWRQLLNAKLITQRKFDNL
TKAERGGLSELDKAGFIKRQLVETRQITKHVAQILDSRMNTKYDENDKLI
REVKVITLKSKLVSDFRKDFQFYKVREINNYHHAHDAYLNAVVGTALIKK
YPKLESEFVYGDYKVYDVRKMIAKSEQEIGKATAKYFFYSNIMNFFKTEI
TLANGEIRKRPLIETNGETGEIVWDKGRDFATVRKVLSMPQVNIVKKTEV
QTGGFSKESIRPKRNSDKLIARKKDWDPKKYGGFLWPTVAYSVLVVAKVE
KGKSKKLKSVKELLGITIMERSSFEKNPIDFLEAKGYKEVKKDLIIKLPK
YSLFELENGRKRMLASAKQLQKGNELALPSKYVNFLYLASHYEKLKGSPE
DNEQKQLFVEQHKHYLDEIIEQISEFSKRVILADANLDKVLSAYNKHRDK
PIREQAENIIHLFTLTRLGAPRAFKYFDTTIDPKQYRSTKEVLDATLIHQ
SITGLYETRIDLSQLGGD.

[0181] Exemplary Streptococcus pyogenes Cas9 variant nickase (SpRY nickase) amino acid sequence:

(SEQ ID NO: 5806)
MDKKYSIGLDIGTNSVGWAVITDEYKVPSKKFKVLGNTDRHSIKKNLIGA
LLFDSGETAERTRLKRTARRRYTRRKNRICYLQEIFSNEMAKVDDSFFHR
LEESFLVEEDKKHERHPIFGNIVDEVAYHEKYPTIYHLRKKLVDSTDKAD
LRLIYLALAHMIKFRGHFLIEGDLNPDNSDVDKLFIQLVQTYNQLFEENP
INASGVDAKAILSARLSKSRRLENLIAQLPGEKKNGLFGNLIALSLGLTP
NFKSNFDLAEDAKLQLSKDTYDDDLDNLLAQIGDQYADLFLAAKNLSDAI
LLSDILRVNTEITKAPLSASMIKRYDEHHQDLTLLKALVRQQLPEKYKEI
FFDQSKNGYAGYIDGGASQEEFYKFIKPILEKMDGTEELLVKLNREDLLR
KQRTFDNGSIPHQIHLGELHAILRRQEDFYPFLKDNREKIEKILTFRIPY
YVGPLARGNSRFAWMTRKSEETITPWNFEEVVDKGASAQSFIERMTNFDK
NLPNEKVLPKHSLLYEYFTVYNELTKVKYVTEGMRKPAFLSGEQKKAIVD
LLFKTNRKVTVKQLKEDYFKKIECFDSVEISGVEDRFNASLGTYHDLLKI
IKDKDFLDNEENEDILEDIVLTLTLFEDREMIEERLKTYAHLFDDKVMKQ
LKRRRYTGWGRLSRKLINGIRDKQSGKTILDFLKSDGFANRNFMQLIHDD
SLTFKEDIQKAQVSGQGDSLHEHIANLAGSPAIKKGILQTVKVVDELVKV
MGRHKPENIVIEMARENQTTQKGQKNSRERMKRIEEGIKELGSQILKEHP
VENTQLQNEKLYLYYLQNGRDMYVDQELDINRLSDYDVDAIVPQSFLKDD
SIDNKVLTRSDKNRGKSDNVPSEEVVKKMKNYWRQLLNAKLITQRKFDNL
TKAERGGLSELDKAGFIKRQLVETRQITKHVAQILDSRMNTKYDENDKLI
REVKVITLKSKLVSDFRKDFQFYKVREINNYHHAHDAYLNAVVGTALIKK
YPKLESEFVYGDYKVYDVRKMIAKSEQEIGKATAKYFFYSNIMNFFKTEI
TLANGEIRKRPLIETNGETGEIVWDKGRDFATVRKVLSMPQVNIVKKTEV
QTGGFSKESIRPKRNSDKLIARKKDWDPKKYGGFLWPTVAYSVLVVAKVE
KGKSKKLKSVKELLGITIMERSSFEKNPIDFLEAKGYKEVKKDLIIKLPK
YSLFELENGRKRMLASAKQLQKGNELALPSKYVNFLYLASHYEKLKGSPE
DNEQKQLFVEQHKHYLDEIIEQISEFSKRVILADANLDKVLSAYNKHRDK
PIREQAENIIHLFTLTRLGAPRAFKYFDTTIDPKQYRSTKEVLDATLIHQ
SITGLYETRIDLSQLGGD.

[0182] Exemplary Streptococcus pyogenes Cas9 variant nickase (SpRY nickase) amino acid sequence lacking N-terminus methionine:

(SEQ ID NO: 5807)
DKKYSIGLDIGTNSVGWAVITDEYKVPSKKFKVLGNTDRHSIKKNLIGAL
LFDSGETAERTRLKRTARRRYTRRKNRICYLQEIFSNEMAKVDDSFFHRL
EESFLVEEDKKHERHPIFGNIVDEVAYHEKYPTIYHLRKKLVDSTDKADL
RLIYLALAHMIKFRGHFLIEGDLNPDNSDVDKLFIQLVQTYNQLFEENPI
NASGVDAKAILSARLSKSRRLENLIAQLPGEKKNGLFGNLIALSLGLTPN
FKSNFDLAEDAKLQLSKDTYDDDLDNLLAQIGDQYADLFLAAKNLSDAIL
LSDILRVNTEITKAPLSASMIKRYDEHHQDLTLLKALVRQQLPEKYKEIF
FDQSKNGYAGYIDGGASQEEFYKFIKPILEKMDGTEELLVKLNREDLLRK
QRTFDNGSIPHQIHLGELHAILRRQEDFYPFLKDNREKIEKILTFRIPYY
VGPLARGNSRFAWMTRKSEETITPWNFEEVVDKGASAQSFIERMTNFDKN
LPNEKVLPKHSLLYEYFTVYNELTKVKYVTEGMRKPAFLSGEQKKAIVDL
LFKTNRKVTVKQLKEDYFKKIECFDSVEISGVEDRFNASLGTYHDLLKII
KDKDFLDNEENEDILEDIVLTLTLFEDREMIEERLKTYAHLFDDKVMKQL
KRRRYTGWGRLSRKLINGIRDKQSGKTILDFLKSDGFANRNFMQLIHDDS
LTFKEDIQKAQVSGQGDSLHEHIANLAGSPAIKKGILQTVKVVDELVKVM
GRHKPENIVIEMARENQTTQKGQKNSRERMKRIEEGIKELGSQILKEHPV
ENTQLQNEKLYLYYLQNGRDMYVDQELDINRLSDYDVDAIVPQSFLKDDS
IDNKVLTRSDKNRGKSDNVPSEEVVKKMKNYWRQLLNAKLITQRKFDNLT
KAERGGLSELDKAGFIKRQLVETRQITKHVAQILDSRMNTKYDENDKLIR
EVKVITLKSKLVSDFRKDFQFYKVREINNYHHAHDAYLNAVVGTALIKKY
PKLESEFVYGDYKVYDVRKMIAKSEQEIGKATAKYFFYSNIMNFFKTEIT
LANGEIRKRPLIETNGETGEIVWDKGRDFATVRKVLSMPQVNIVKKTEVQ
TGGFSKESIRPKRNSDKLIARKKDWDPKKYGGFLWPTVAYSVLVVAKVEK
GKSKKLKSVKELLGITIMERSSFEKNPIDFLEAKGYKEVKKDLIIKLPKY
SLFELENGRKRMLASAKQLQKGNELALPSKYVNFLYLASHYEKLKGSPED
NEQKQLFVEQHKHYLDEIIEQISEFSKRVILADANLDKVLSAYNKHRDKP
IREQAENIIHLFTLTRLGAPRAFKYFDTTIDPKQYRSTKEVLDATLIHQS
ITGLYETRIDLSQLGGD.

[0183] Exemplary Streptococcus pyogenes Cas9 variant (SpG) amino acid sequence:

(SEQ ID NO: 5816)
MDKKYSIGLDIGTNSVGWAVITDEYKVPSKKFKVLGNTDRHSIKKNLIGA
LLFDSGETAEATRLKRTARRRYTRRKNRICYLQEIFSNEMAKVDDSFFHR
LEESFLVEEDKKHERHPIFGNIVDEVAYHEKYPTIYHLRKKLVDSTDKAD
LRLIYLALAHMIKFRGHFLIEGDLNPDNSDVDKLFIQLVQTYNQLFEENP
INASGVDAKAILSARLSKSRRLENLIAQLPGEKKNGLFGNLIALSLGLTP
NFKSNFDLAEDAKLQLSKDTYDDDLDNLLAQIGDQYADLFLAAKNLSDAI
LLSDILRVNTEITKAPLSASMIKRYDEHHQDLTLLKALVRQQLPEKYKEI
FFDQSKNGYAGYIDGGASQEEFYKFIKPILEKMDGTEELLVKLNREDLLR
KQRTFDNGSIPHQIHLGELHAILRRQEDFYPFLKDNREKIEKILTFRIPY
YVGPLARGNSRFAWMTRKSEETITPWNFEEVVDKGASAQSFIERMTNFDK
NLPNEKVLPKHSLLYEYFTVYNELTKVKYVTEGMRKPAFLSGEQKKAIVD
LLFKTNRKVTVKQLKEDYFKKIECFDSVEISGVEDRFNASLGTYHDLLKI
IKDKDFLDNEENEDILEDIVLTLTLFEDREMIEERLKTYAHLFDDKVMKQ
LKRRRYTGWGRLSRKLINGIRDKQSGKTILDFLKSDGFANRNFMQLIHDD
SLTFKEDIQKAQVSGQGDSLHEHIANLAGSPAIKKGILQTVKVVDELVKV
MGRHKPENIVIEMARENQTTQKGQKNSRERMKRIEEGIKELGSQILKEHP
VENTQLQNEKLYLYYLQNGRDMYVDQELDINRLSDYDVDHIVPQSFLKDD
SIDNKVLTRSDKNRGKSDNVPSEEVVKKMKNYWRQLLNAKLITQRKFDNL
TKAERGGLSELDKAGFIKRQLVETRQITKHVAQILDSRMNTKYDENDKLI
REVKVITLKSKLVSDFRKDFQFYKVREINNYHHAHDAYLNAVVGTALIKK
YPKLESEFVYGDYKVYDVRKMIAKSEQEIGKATAKYFFYSNIMNFFKTEI
TLANGEIRKRPLIETNGETGEIVWDKGRDFATVRKVLSMPQVNIVKKTEV
QTGGFSKESILPKRNSDKLIARKKDWDPKKYGGFLWPTVAYSVLVVAKVE
KGKSKKLKSVKELLGITIMERSSFEKNPIDFLEAKGYKEVKKDLIIKLPK
YSLFELENGRKRMLASAKQLQKGNELALPSKYVNFLYLASHYEKLKGSPE
DNEQKQLFVEQHKHYLDEIIEQISEFSKRVILADANLDKVLSAYNKHRDK
PIREQAENIIHLFTLTNLGAPAAFKYFDTTIDRKQYRSTKEVLDATLIHQ
SITGLYETRIDLSQLGGD.

[0184] Exemplary Streptococcus pyogenes Cas9 variant (SpG) amino acid sequence lacking N-terminus methionine:

(SEQ ID NO: 5817)
DKKYSIGLDIGTNSVGWAVITDEYKVPSKKFKVLGNTDRHSIKKNLIGAL
LFDSGETAEATRLKRTARRRYTRRKNRICYLQEIFSNEMAKVDDSFFHRL
EESFLVEEDKKHERHPIFGNIVDEVAYHEKYPTIYHLRKKLVDSTDKADL
RLIYLALAHMIKFRGHFLIEGDLNPDNSDVDKLFIQLVQTYNQLFEENPI
NASGVDAKAILSARLSKSRRLENLIAQLPGEKKNGLFGNLIALSLGLTPN
FKSNFDLAEDAKLQLSKDTYDDDLDNLLAQIGDQYADLFLAAKNLSDAIL
LSDILRVNTEITKAPLSASMIKRYDEHHQDLTLLKALVRQQLPEKYKEIF
FDQSKNGYAGYIDGGASQEEFYKFIKPILEKMDGTEELLVKLNREDLLRK
QRTFDNGSIPHQIHLGELHAILRRQEDFYPFLKDNREKIEKILTFRIPYY
VGPLARGNSRFAWMTRKSEETITPWNFEEVVDKGASAQSFIERMTNFDKN
LPNEKVLPKHSLLYEYFTVYNELTKVKYVTEGMRKPAFLSGEQKKAIVDL
LFKTNRKVTVKQLKEDYFKKIECFDSVEISGVEDRFNASLGTYHDLLKII
KDKDFLDNEENEDILEDIVLTLTLFEDREMIEERLKTYAHLFDDKVMKQL
KRRRYTGWGRLSRKLINGIRDKQSGKTILDFLKSDGFANRNFMQLIHDDS
LTFKEDIQKAQVSGQGDSLHEHIANLAGSPAIKKGILQTVKVVDELVKVM
GRHKPENIVIEMARENQTTQKGQKNSRERMKRIEEGIKELGSQILKEHPV
ENTQLQNEKLYLYYLQNGRDMYVDQELDINRLSDYDVDHIVPQSFLKDDS
IDNKVLTRSDKNRGKSDNVPSEEVVKKMKNYWRQLLNAKLITQRKFDNLT
KAERGGLSELDKAGFIKRQLVETRQITKHVAQILDSRMNTKYDENDKLIR
EVKVITLKSKLVSDFRKDFQFYKVREINNYHHAHDAYLNAVVGTALIKKY
PKLESEFVYGDYKVYDVRKMIAKSEQEIGKATAKYFFYSNIMNFFKTEIT
LANGEIRKRPLIETNGETGEIVWDKGRDFATVRKVLSMPQVNIVKKTEVQ
TGGFSKESILPKRNSDKLIARKKDWDPKKYGGFLWPTVAYSVLVVAKVEK
GKSKKLKSVKELLGITIMERSSFEKNPIDFLEAKGYKEVKKDLIIKLPKY
SLFELENGRKRMLASAKQLQKGNELALPSKYVNFLYLASHYEKLKGSPED
NEQKQLFVEQHKHYLDEIIEQISEFSKRVILADANLDKVLSAYNKHRDKP
IREQAENIIHLFTLTNLGAPAAFKYFDTTIDRKQYRSTKEVLDATLIHQS
ITGLYETRIDLSQLGGD.

[0185] Exemplary Streptococcus pyogenes Cas9 variant (SpG nickase) amino acid sequence:

(SEQ ID NO: 5818)
MDKKYSIGLDIGTNSVGWAVITDEYKVPSKKFKVLGNTDRHSIKKNLIGA
LLFDSGETAEATRLKRTARRRYTRRKNRICYLQEIFSNEMAKVDDSFFHR
LEESFLVEEDKKHERHPIFGNIVDEVAYHEKYPTIYHLRKKLVDSTDKAD
LRLIYLALAHMIKFRGHFLIEGDLNPDNSDVDKLFIQLVQTYNQLFEENP
INASGVDAKAILSARLSKSRRLENLIAQLPGEKKNGLFGNLIALSLGLTP
NFKSNFDLAEDAKLQLSKDTYDDDLDNLLAQIGDQYADLFLAAKNLSDAI
LLSDILRVNTEITKAPLSASMIKRYDEHHQDLTLLKALVRQQLPEKYKEI
FFDQSKNGYAGYIDGGASQEEFYKFIKPILEKMDGTEELLVKLNREDLLR
KQRTFDNGSIPHQIHLGELHAILRRQEDFYPFLKDNREKIEKILTFRIPY
YVGPLARGNSRFAWMTRKSEETITPWNFEEVVDKGASAQSFIERMTNFDK
NLPNEKVLPKHSLLYEYFTVYNELTKVKYVTEGMRKPAFLSGEQKKAIVD
LLFKTNRKVTVKQLKEDYFKKIECFDSVEISGVEDRFNASLGTYHDLLKI
IKDKDFLDNEENEDILEDIVLTLTLFEDREMIEERLKTYAHLFDDKVMKQ
LKRRRYTGWGRLSRKLINGIRDKQSGKTILDFLKSDGFANRNFMQLIHDD
SLTFKEDIQKAQVSGQGDSLHEHIANLAGSPAIKKGILQTVKVVDELVKV
MGRHKPENIVIEMARENQTTQKGQKNSRERMKRIEEGIKELGSQILKEHP
VENTQLQNEKLYLYYLQNGRDMYVDQELDINRLSDYDVDAIVPQSFLKDD
SIDNKVLTRSDKNRGKSDNVPSEEVVKKMKNYWRQLLNAKLITQRKFDNL
TKAERGGLSELDKAGFIKRQLVETRQITKHVAQILDSRMNTKYDENDKLI
REVKVITLKSKLVSDFRKDFQFYKVREINNYHHAHDAYLNAVVGTALIKK
YPKLESEFVYGDYKVYDVRKMIAKSEQEIGKATAKYFFYSNIMNFFKTEI
TLANGEIRKRPLIETNGETGEIVWDKGRDFATVRKVLSMPQVNIVKKTEV
QTGGFSKESILPKRNSDKLIARKKDWDPKKYGGFLWPTVAYSVLVVAKVE
KGKSKKLKSVKELLGITIMERSSFEKNPIDFLEAKGYKEVKKDLIIKLPK
YSLFELENGRKRMLASAKQLQKGNELALPSKYVNFLYLASHYEKLKGSPE
DNEQKQLFVEQHKHYLDEIIEQISEFSKRVILADANLDKVLSAYNKHRDK
PIREQAENIIHLFTLTNLGAPAAFKYFDTTIDRKQYRSTKEVLDATLIHQ
SITGLYETRIDLSQLGGD.

[0186] Exemplary Streptococcus pyogenes Cas9 variant (SpG nickase) amino acid sequence lacking N-terminus methionine:

(SEQ ID NO: 5819)
DKKYSIGLDIGTNSVGWAVITDEYKVPSKKFKVLGNTDRHSIKKNLIGAL
LFDSGETAEATRLKRTARRRYTRRKNRICYLQEIFSNEMAKVDDSFFHRL
EESFLVEEDKKHERHPIFGNIVDEVAYHEKYPTIYHLRKKLVDSTDKADL
RLIYLALAHMIKFRGHFLIEGDLNPDNSDVDKLFIQLVQTYNQLFEENPI
NASGVDAKAILSARLSKSRRLENLIAQLPGEKKNGLFGNLIALSLGLTPN
FKSNFDLAEDAKLQLSKDTYDDDLDNLLAQIGDQYADLFLAAKNLSDAIL
LSDILRVNTEITKAPLSASMIKRYDEHHQDLTLLKALVRQQLPEKYKEIF
FDQSKNGYAGYIDGGASQEEFYKFIKPILEKMDGTEELLVKLNREDLLRK
QRTFDNGSIPHQIHLGELHAILRRQEDFYPFLKDNREKIEKILTFRIPYY
VGPLARGNSRFAWMTRKSEETITPWNFEEVVDKGASAQSFIERMTNFDKN
LPNEKVLPKHSLLYEYFTVYNELTKVKYVTEGMRKPAFLSGEQKKAIVDL
LFKTNRKVTVKQLKEDYFKKIECFDSVEISGVEDRFNASLGTYHDLLKII
KDKDFLDNEENEDILEDIVLTLTLFEDREMIEERLKTYAHLFDDKVMKQL
KRRRYTGWGRLSRKLINGIRDKQSGKTILDFLKSDGFANRNFMQLIHDDS
LTFKEDIQKAQVSGQGDSLHEHIANLAGSPAIKKGILQTVKVVDELVKVM
GRHKPENIVIEMARENQTTQKGQKNSRERMKRIEEGIKELGSQILKEHPV
ENTQLQNEKLYLYYLQNGRDMYVDQELDINRLSDYDVDAIVPQSFLKDDS
IDNKVLTRSDKNRGKSDNVPSEEVVKKMKNYWRQLLNAKLITQRKFDNLT
KAERGGLSELDKAGFIKRQLVETRQITKHVAQILDSRMNTKYDENDKLIR
EVKVITLKSKLVSDFRKDFQFYKVREINNYHHAHDAYLNAVVGTALIKKY
PKLESEFVYGDYKVYDVRKMIAKSEQEIGKATAKYFFYSNIMNFFKTEIT
LANGEIRKRPLIETNGETGEIVWDKGRDFATVRKVLSMPQVNIVKKTEVQ
TGGFSKESILPKRNSDKLIARKKDWDPKKYGGFLWPTVAYSVLVVAKVEK
GKSKKLKSVKELLGITIMERSSFEKNPIDFLEAKGYKEVKKDLIIKLPKY
SLFELENGRKRMLASAKQLQKGNELALPSKYVNFLYLASHYEKLKGSPED
NEQKQLFVEQHKHYLDEIIEQISEFSKRVILADANLDKVLSAYNKHRDKP
IREQAENIIHLFTLTNLGAPAAFKYFDTTIDRKQYRSTKEVLDATLIHQS
ITGLYETRIDLSQLGGD.

[0187] In some embodiments, a Cas9 is a chimeric Cas9, e.g., modified Cas9; e.g., synthetic RNA-guided nucleases (sRGNs), e.g., modified by DNA family shuffling, e.g., sRGN3.1, sRGN3.3. In some embodiments, the DNA family shuffling comprises, fragmentation and reassembly of parental Cas9 genes, e.g., one or more of Cas9s from Staphylococcus hyicus (Shy), Staphylococcus lugdunensis (Slu), Staphylococcus microti (Smi), and Staphylococcus pasteuri (Spa). In some embodiments, a modified sluCas9 shows increased editing efficiency and/or specificity relative to a sluCas9 that is not modified. In some embodiments, a modified Cas9, e.g., a sRGN shows at least 10%, at least 20%, at least 30%, at least 40%, at least 50%, at least 60%, at least 70%, at least 80%, at least 90%, at least 100%, at least 150%, at least 200%, at least 300%, at least 400%, at least 500%, at least 600%, at least 700%, at least 800%, at least 900%, or at least 1000% increase in editing efficiency compared to a Cas9 that is not modified. In some embodiments, a Cas9, e.g., a sRGN shows at least 10%, at least 20%, at least 30%, at least 40%, at least 50%, at least 60%, at least 70%, at least 80%, at least 90%, at least 100%, at least 150%, at least 200%, at least 300%, at least 400%, at least 500%, at least 600%, at least 700%, at least 800%, at least 900%, or at least 1000% increase in specificity compared to a Cas9 that is not modified. In some embodiments, a Cas9, e.g., a sRGN shows at least 10%, at least 20%, at least 30%, at least 40%, at least 50%, at least 60%, at least 70%, at least 80%, at least 90%, at least 100%, at least 150%, at least 200%, at least 300%, at least 400%, at least 500%, at least 600%, at least 700%, at least 800%, at least 900%, or at least 1000% increase in cleavage activity compared to a Cas9 that is not modified. In some embodiments, a Cas9, e.g., a sRGN shows ability to cleave a 5′-NNGG-3′ PAM-containing target. In some embodiments, a prime editor may comprise a Cas9 (e.g., a chimeric Cas9), e.g., as according any of the sequences selected from 5808-5815 or a variant thereof. Exemplary amino acid sequences of sRGN useful in the prime editors disclosed herein are provided below in SEQ ID NOs: 5808-5815.

[0188] Exemplary sRGN3.1 amino acid sequence:

(SEQ ID NO: 5808)
MNQKFILGLDIGITSVGYGLIDYETKNIIDAGVRLFPEANVENNEGRRSK
RGSRRLKRRRIHRLERVKLLLTEYDLINKEQIPTSNNPYQIRVKGLSEIL
SKDELAIALLHLAKRRGIHNVDVAADKEETASDSLSTKDQINKNAKFLES
RYVCELQKERLENEGHVRGVENRFLTKDIVREAKKIIDTQMQYYPEIDET
FKEKYISLVETRREYFEGPGQGSPFGWNGDLKKWYEMLMGHCTYFPQELR
SVKYAYSADLFNALNDLNNLIIQRDNSEKLEYHEKYHIIENVFKQKKKPT
LKQIAKEIGVNPEDIKGYRITKSGTPEFTSFKLFHDLKKVVKDHAILDDI
DLLNQIAEILTIYQDKDSIVAELGQLEYLMSEADKQSISELTGYTGTHSL
SLKCMNMIIDELWHSSMNQMEVFTYLNMRPKKYELKGYQRIPTDMIDDAI
LSPVVKRTFIQSINVINKVIEKYGIPEDIIIELARENNSDDRKKFINNLQ
KKNEATRKRINEIIGQTGNQNAKRIVEKIRLHDQQEGKCLYSLESIPLED
LLNNPNHYEVDHIIPRSVSFDNSYHNKVLVKQSENSKKSNLTPYQYFNSG
KSKLSYNQFKQHILNLSKSQDRISKKKKEYLLEERDINKFEVQKEFINRN
LVDTRYATRELTNYLKAYFSANNMNVKVKTINGSFTDYLRKVWKFKKERN
HGYKHHAEDALIIANADFLFKENKKLKAVNSVLEKPEIETKQLDIQVDSE
DNYSEMFIIPKQVQDIKDFRNFKYSHRVDKKPNRQLINDTLYSTRKKDNS
TYIVQTIKDIYAKDNTTLKKQFDKSPEKFLMYQHDPRTFEKLEVIMKQYA
NEKNPLAKYHEETGEYLTKYSKKNNGPIVKSLKYIGNKLGSHLDVTHQFK
SSTKKLVKLSIKNYRFDVYLTEKGYKFVTIAYLNVFKKDNYYYIPKDKYQ
ELKEKKKIKDTDQFIASFYKNDLIKLNGDLYKIIGVNSDDRNIIELDYYD
IKYKDYCEINNIKGEPRIKKTIGKKTESIEKFTTDVLGNLYLHSTEKAPQ
LIFKRGL.

[0189] Exemplary sRGN3.1 amino acid sequence lacking N-terminus methionine:

(SEQ ID NO: 5809)
NQKFILGLDIGITSVGYGLIDYETKNIIDAGVRLFPEANVENNEGRRSKR
GSRRLKRRRIHRLERVKLLLTEYDLINKEQIPTSNNPYQIRVKGLSEILS
KDELAIALLHLAKRRGIHNVDVAADKEETASDSLSTKDQINKNAKFLESR
YVCELQKERLENEGHVRGVENRFLTKDIVREAKKIIDTQMQYYPEIDETF
KEKYISLVETRREYFEGPGQGSPFGWNGDLKKWYEMLMGHCTYFPQELRS
VKYAYSADLFNALNDLNNLIIQRDNSEKLEYHEKYHIIENVFKQKKKPTL
KQIAKEIGVNPEDIKGYRITKSGTPEFTSFKLFHDLKKVVKDHAILDDID
LLNQIAEILTIYQDKDSIVAELGQLEYLMSEADKQSISELTGYTGTHSLS
LKCMNMIIDELWHSSMNQMEVFTYLNMRPKKYELKGYQRIPTDMIDDAIL
SPVVKRTFIQSINVINKVIEKYGIPEDIIIELARENNSDDRKKFINNLQK
KNEATRKRINEIIGQTGNQNAKRIVEKIRLHDQQEGKCLYSLESIPLEDL
LNNPNHYEVDHIIPRSVSFDNSYHNKVLVKQSENSKKSNLTPYQYFNSGK
SKLSYNQFKQHILNLSKSQDRISKKKKEYLLEERDINKFEVQKEFINRNL
VDTRYATRELTNYLKAYFSANNMNVKVKTINGSFTDYLRKVWKFKKERNH
GYKHHAEDALIIANADFLFKENKKLKAVNSVLEKPEIETKQLDIQVDSED
NYSEMFIIPKQVQDIKDFRNFKYSHRVDKKPNRQLINDTLYSTRKKDNST
YIVQTIKDIYAKDNTTLKKQFDKSPEKFLMYQHDPRTFEKLEVIMKQYAN
EKNPLAKYHEETGEYLTKYSKKNNGPIVKSLKYIGNKLGSHLDVTHQFKS
STKKLVKLSIKNYRFDVYLTEKGYKFVTIAYLNVFKKDNYYYIPKDKYQE
LKEKKKIKDTDQFIASFYKNDLIKLNGDLYKIIGVNSDDRNIIELDYYDI
KYKDYCEINNIKGEPRIKKTIGKKTESIEKFTTDVLGNLYLHSTEKAPQL
IFKRGL.

[0190] Exemplary sRGN3.1 nickase amino acid sequence:

(SEQ ID NO: 5810)
MNQKFILGLDIGITSVGYGLIDYETKNIIDAGVRLFPEANVENNEGRRSK
RGSRRLKRRRIHRLERVKLLLTEYDLINKEQIPTSNNPYQIRVKGLSEIL
SKDELAIALLHLAKRRGIHNVDVAADKEETASDSLSTKDQINKNAKFLES
RYVCELQKERLENEGHVRGVENRFLTKDIVREAKKIIDTQMQYYPEIDET
FKEKYISLVETRREYFEGPGQGSPFGWNGDLKKWYEMLMGHCTYFPQELR
SVKYAYSADLFNALNDLNNLIIQRDNSEKLEYHEKYHIIENVFKQKKKPT
LKQIAKEIGVNPEDIKGYRITKSGTPEFTSFKLFHDLKKVVKDHAILDDI
DLLNQIAEILTIYQDKDSIVAELGQLEYLMSEADKQSISELTGYTGTHSL
SLKCMNMIIDELWHSSMNQMEVFTYLNMRPKKYELKGYQRIPTDMIDDAI
LSPVVKRTFIQSINVINKVIEKYGIPEDIIIELARENNSDDRKKFINNLQ
KKNEATRKRINEIIGQTGNQNAKRIVEKIRLHDQQEGKCLYSLESIPLED
LLNNPNHYEVDHIIPRSVSFDNSYHNKVLVKQSEASKKSNLTPYQYFNSG
KSKLSYNQFKQHILNLSKSQDRISKKKKEYLLEERDINKFEVQKEFINRN
LVDTRYATRELTNYLKAYFSANNMNVKVKTINGSFTDYLRKVWKFKKERN
HGYKHHAEDALIIANADFLFKENKKLKAVNSVLEKPEIETKQLDIQVDSE
DNYSEMFIIPKQVQDIKDFRNFKYSHRVDKKPNRQLINDTLYSTRKKDNS
TYIVQTIKDIYAKDNTTLKKQFDKSPEKFLMYQHDPRTFEKLEVIMKQYA
NEKNPLAKYHEETGEYLTKYSKKNNGPIVKSLKYIGNKLGSHLDVTHQFK
SSTKKLVKLSIKNYRFDVYLTEKGYKFVTIAYLNVFKKDNYYYIPKDKYQ
ELKEKKKIKDTDQFIASFYKNDLIKLNGDLYKIIGVNSDDRNIIELDYYD
IKYKDYCEINNIKGEPRIKKTIGKKTESIEKFTTDVLGNLYLHSTEKAPQ
LIFKRGL.

[0191] Exemplary sRGN3.1 nickase amino acid sequence lacking N-terminus methionine:

(SEQ ID NO: 5811)
NQKFILGLDIGITSVGYGLIDYETKNIIDAGVRLFPEANVENNEGRRSKR
GSRRLKRRRIHRLERVKLLLTEYDLINKEQIPTSNNPYQIRVKGLSEILS
KDELAIALLHLAKRRGIHNVDVAADKEETASDSLSTKDQINKNAKFLESR
YVCELQKERLENEGHVRGVENRFLTKDIVREAKKIIDTQMQYYPEIDETF
KEKYISLVETRREYFEGPGQGSPFGWNGDLKKWYEMLMGHCTYFPQELRS
VKYAYSADLFNALNDLNNLIIQRDNSEKLEYHEKYHIIENVFKQKKKPTL
KQIAKEIGVNPEDIKGYRITKSGTPEFTSFKLFHDLKKVVKDHAILDDID
LLNQIAEILTIYQDKDSIVAELGQLEYLMSEADKQSISELTGYTGTHSLS
LKCMNMIIDELWHSSMNQMEVFTYLNMRPKKYELKGYQRIPTDMIDDAIL
SPVVKRTFIQSINVINKVIEKYGIPEDIIIELARENNSDDRKKFINNLQK
KNEATRKRINEIIGQTGNQNAKRIVEKIRLHDQQEGKCLYSLESIPLEDL
LNNPNHYEVDHIIPRSVSFDNSYHNKVLVKQSEASKKSNLTPYQYFNSGK
SKLSYNQFKQHILNLSKSQDRISKKKKEYLLEERDINKFEVQKEFINRNL
VDTRYATRELTNYLKAYFSANNMNVKVKTINGSFTDYLRKVWKFKKERNH
GYKHHAEDALIIANADFLFKENKKLKAVNSVLEKPEIETKQLDIQVDSED
NYSEMFIIPKQVQDIKDFRNFKYSHRVDKKPNRQLINDTLYSTRKKDNST
YIVQTIKDIYAKDNTTLKKQFDKSPEKFLMYQHDPRTFEKLEVIMKQYAN
EKNPLAKYHEETGEYLTKYSKKNNGPIVKSLKYIGNKLGSHLDVTHQFKS
STKKLVKLSIKNYRFDVYLTEKGYKFVTIAYLNVFKKDNYYYIPKDKYQE
LKEKKKIKDTDQFIASFYKNDLIKLNGDLYKIIGVNSDDRNIIELDYYDI
KYKDYCEINNIKGEPRIKKTIGKKTESIEKFTTDVLGNLYLHSTEKAPQL
IFKRGL.

[0192] Exemplary sRGN3.3 amino acid sequence:

(SEQ ID NO: 5812)
MNQKFILGLDIGITSVGYGLIDYETKNIIDAGVRLFPEANVENNEGRRSK
RGSRRLKRRRIHRLERVKLLLTEYDLINKEQIPTSNNPYQIRVKGLSEIL
SKDELAIALLHLAKRRGIHNVDVAADKEETASDSLSTKDQINKNAKFLES
RYVCELQKERLENEGHVRGVENRFLTKDIVREAKKIIDTQMQYYPEIDET
FKEKYISLVETRREYFEGPGQGSPFGWNGDLKKWYEMLMGHCTYFPQELR
SVKYAYSADLFNALNDLNNLIIQRDNSEKLEYHEKYHIIENVFKQKKKPT
LKQIAKEIGVNPEDIKGYRITKSGTPEFTSFKLFHDLKKVVKDHAILDDI
DLLNQIAEILTIYQDKDSIVAELGQLEYLMSEADKQSISELTGYTGTHSL
SLKCMNMIIDELWHSSMNQMEVFTYLNMRPKKYELKGYQRIPTDMIDDAI
LSPVVKRTFIQSINVINKVIEKYGIPEDIIIELARENNSDDRKKFINNLQ
KKNEATRKRINEIIGQTGNQNAKRIVEKIRLHDQQEGKCLYSLESIPLED
LLNNPNHYEVDHIIPRSVSFDNSYHNKVLVKQSENSKKSNLTPYQYFNSG
KSKLSYNQFKQHILNLSKSQDRISKKKKEYLLEERDINKFEVQKEFINRN
LVDTRYATRELTSYLKAYFSANNMDVKVKTINGSFTNHLRKVWRFDKYRN
HGYKHHAEDALIIANADFLFKENKKLQNTNKILEKPTIENNTKKVTVEKE
EDYNNVFETPKLVEDIKQYRDYKFSHRVDKKPNRQLINDTLYSTRMKDEH
DYIVQTITDIYGKDNTNLKKQFNKNPEKFLMYQNDPKTFEKLSIIMKQYS
DEKNPLAKYYEETGEYLTKYSKKNNGPIVKKIKLLGNKVGNHLDVTNKYE
NSTKKLVKLSIKNYRFDVYLTEKGYKFVTIAYLNVFKKDNYYYIPKDKYQ
ELKEKKKIKDTDQFIASFYKNDLIKLNGDLYKIIGVNSDDRNIIELDYYD
IKYKDYCEINNIKGEPRIKKTIGKKTESIEKFTTDVLGNLYLHSTEKAPQ
LIFKRGL.

[0193] Exemplary sRGN3.3 amino acid sequence lacking N-terminus methionine:

(SEQ ID NO: 5813)
NQKFILGLDIGITSVGYGLIDYETKNIIDAGVRLFPEANVENNEGRRSKR
GSRRLKRRRIHRLERVKLLLTEYDLINKEQIPTSNNPYQIRVKGLSEILS
KDELAIALLHLAKRRGIHNVDVAADKEETASDSLSTKDQINKNAKFLESR
YVCELQKERLENEGHVRGVENRFLTKDIVREAKKIIDTQMQYYPEIDETF
KEKYISLVETRREYFEGPGQGSPFGWNGDLKKWYEMLMGHCTYFPQELRS
VKYAYSADLFNALNDLNNLIIQRDNSEKLEYHEKYHIIENVFKQKKKPTL
KQIAKEIGVNPEDIKGYRITKSGTPEFTSFKLFHDLKKVVKDHAILDDID
LLNQIAEILTIYQDKDSIVAELGQLEYLMSEADKQSISELTGYTGTHSLS
LKCMNMIIDELWHSSMNQMEVFTYLNMRPKKYELKGYQRIPTDMIDDAIL
SPVVKRTFIQSINVINKVIEKYGIPEDIIIELARENNSDDRKKFINNLQK
KNEATRKRINEIIGQTGNQNAKRIVEKIRLHDQQEGKCLYSLESIPLEDL
LNNPNHYEVDHIIPRSVSFDNSYHNKVLVKQSENSKKSNLTPYQYFNSGK
SKLSYNQFKQHILNLSKSQDRISKKKKEYLLEERDINKFEVQKEFINRNL
VDTRYATRELTSYLKAYFSANNMDVKVKTINGSFTNHLRKVWRFDKYRNH
GYKHHAEDALIIANADFLFKENKKLQNTNKILEKPTIENNTKKVTVEKEE
DYNNVFETPKLVEDIKQYRDYKFSHRVDKKPNRQLINDTLYSTRMKDEHD
YIVQTITDIYGKDNTNLKKQFNKNPEKFLMYQNDPKTFEKLSIIMKQYSD
EKNPLAKYYEETGEYLTKYSKKNNGPIVKKIKLLGNKVGNHLDVTNKYEN
STKKLVKLSIKNYRFDVYLTEKGYKFVTIAYLNVFKKDNYYYIPKDKYQE
LKEKKKIKDTDQFIASFYKNDLIKLNGDLYKIIGVNSDDRNIIELDYYDI
KYKDYCEINNIKGEPRIKKTIGKKTESIEKFTTDVLGNLYLHSTEKAPQL
IFKRGL.

[0194] Exemplary sRGN3.3 nickase amino acid sequence:

(SEQ ID NO: 5814)
MNQKFILGLDIGITSVGYGLIDYETKNIIDAGVRLFPEANVENNEGRRSK
RGSRRLKRRRIHRLERVKLLLTEYDLINKEQIPTSNNPYQIRVKGLSEIL
SKDELAIALLHLAKRRGIHNVDVAADKEETASDSLSTKDQINKNAKFLES
RYVCELQKERLENEGHVRGVENRFLTKDIVREAKKIIDTQMQYYPEIDET
FKEKYISLVETRREYFEGPGQGSPFGWNGDLKKWYEMLMGHCTYFPQELR
SVKYAYSADLFNALNDLNNLIIQRDNSEKLEYHEKYHIIENVFKQKKKPT
LKQIAKEIGVNPEDIKGYRITKSGTPEFTSFKLFHDLKKVVKDHAILDDI
DLLNQIAEILTIYQDKDSIVAELGQLEYLMSEADKQSISELTGYTGTHSL
SLKCMNMIIDELWHSSMNQMEVFTYLNMRPKKYELKGYQRIPTDMIDDAI
LSPVVKRTFIQSINVINKVIEKYGIPEDIIIELARENNSDDRKKFINNLQ
KKNEATRKRINEIIGQTGNQNAKRIVEKIRLHDQQEGKCLYSLESIPLED
LLNNPNHYEVDHIIPRSVSFDNSYHNKVLVKQSEASKKSNLTPYQYFNSG
KSKLSYNQFKQHILNLSKSQDRISKKKKEYLLEERDINKFEVQKEFINRN
LVDTRYATRELTSYLKAYFSANNMDVKVKTINGSFTNHLRKVWRFDKYRN
HGYKHHAEDALIIANADFLFKENKKLQNTNKILEKPTIENNTKKVTVEKE
EDYNNVFETPKLVEDIKQYRDYKFSHRVDKKPNRQLINDTLYSTRMKDEH
DYIVQTITDIYGKDNTNLKKQFNKNPEKFLMYQNDPKTFEKLSIIMKQYS
DEKNPLAKYYEETGEYLTKYSKKNNGPIVKKIKLLGNKVGNHLDVTNKYE
NSTKKLVKLSIKNYRFDVYLTEKGYKFVTIAYLNVFKKDNYYYIPKDKYQ
ELKEKKKIKDTDQFIASFYKNDLIKLNGDLYKIIGVNSDDRNIIELDYYD
IKYKDYCEINNIKGEPRIKKTIGKKTESIEKFTTDVLGNLYLHSTEKAQP
LIFKRGL.

[0195] Exemplary sRGN3.3 nickase amino acid sequence lacking N-terminus methionine:

(SEQ ID NO: 5815)
NQKFILGLDIGITSVGYGLIDYETKNIIDAGVRLFPEANVENNEGRRSKR
GSRRLKRRRIHRLERVKLLLTEYDLINKEQIPTSNNPYQIRVKGLSEILS
KDELAIALLHLAKRRGIHNVDVAADKEETASDSLSTKDQINKNAKFLESR
YVCELQKERLENEGHVRGVENRFLTKDIVREAKKIIDTQMQYYPEIDETF
KEKYISLVETRREYFEGPGQGSPFGWNGDLKKWYEMLMGHCTYFPQELRS
VKYAYSADLFNALNDLNNLIIQRDNSEKLEYHEKYHIIENVFKQKKKPTL
KQIAKEIGVNPEDIKGYRITKSGTPEFTSFKLFHDLKKVVKDHAILDDID
LLNQIAEILTIYQDKDSIVAELGQLEYLMSEADKQSISELTGYTGTHSLS
LKCMNMIIDELWHSSMNQMEVFTYLNMRPKKYELKGYQRIPTDMIDDAIL
SPVVKRTFIQSINVINKVIEKYGIPEDIIIELARENNSDDRKKFINNLQK
KNEATRKRINEIIGQTGNQNAKRIVEKIRLHDQQEGKCLYSLESIPLEDL
LNNPNHYEVDHIIPRSVSFDNSYHNKVLVKQSEASKKSNLTPYQYFNSGK
SKLSYNQFKQHILNLSKSQDRISKKKKEYLLEERDINKFEVQKEFINRNL
VDTRYATRELTSYLKAYFSANNMDVKVKTINGSFTNHLRKVWRFDKYRNH
GYKHHAEDALIIANADFLFKENKKLQNTNKILEKPTIENNTKKVTVEKEE
DYNNVFETPKLVEDIKQYRDYKFSHRVDKKPNRQLINDTLYSTRMKDEHD
YIVQTITDIYGKDNTNLKKQFNKNPEKFLMYQNDPKTFEKLSIIMKQYSD
EKNPLAKYYEETGEYLTKYSKKNNGPIVKKIKLLGNKVGNHLDVTNKYEN
STKKLVKLSIKNYRFDVYLTEKGYKFVTIAYLNVFKKDNYYYIPKDKYQE
LKEKKKIKDTDQFIASFYKNDLIKLNGDLYKIIGVNSDDRNIIELDYYDI
KYKDYCEINNIKGEPRIKKTIGKKTESIEKFTTDVLGNLYLHSTEKAPQL
IFKRGL.

[0196] In some embodiments, a Cas9 protein comprises a variant Cas9 protein containing one or more amino acid substitutions. In some embodiments, a wildtype Cas9 protein comprises a RuvC domain and an HNH domain. In some embodiments, a prime editor comprises a nuclease active Cas9 protein that may cleave both strands of a double stranded target DNA sequence. In some embodiments, the nuclease active Cas9 protein comprises a functional RuvC domain and a functional HNH domain. In some embodiments, a prime editor comprises a Cas9 nickase that can bind to a guide polynucleotide and recognize a target DNA, but can cleave only one strand of a double stranded target DNA. In some embodiments, the Cas9 nickase comprises only one functional RuvC domain or one functional HNH domain. In some embodiments, a prime editor comprises a Cas9 that has a non-functional HNH domain and a functional RuvC domain. In some embodiments, the prime editor can cleave the edit strand (i.e. the PAM strand), but not the non-edit strand of a double stranded target DNA sequence. In some embodiments, a prime editor comprises a Cas9 having a non-functional RuvC domain that can cleave the target strand (i.e. the non-PAM strand), but not the edit strand of a double stranded target DNA sequence. In some embodiments, a prime editor comprises a Cas9 that has neither a functional RuvC domain nor a functional HNH domain, which may not cleave any strand of a double stranded target DNA sequence.

[0197] In some embodiments, a prime editor comprises a Cas9 having a mutation in the RuvC domain that reduces or abolishes the nuclease activity of the RuvC domain. In some embodiments, the Cas9 comprise a mutation at amino acid D10 as compared to a wild type SpCas9 as set forth in SEQ ID NO:5783, or a corresponding mutation thereof. In some embodiments, the Cas9 comprise a D10A mutation as compared to a wild type SpCas9 as set forth in SEQ ID NO: 5783, or a corresponding mutation thereof. In some embodiments, the Cas9 polypeptide comprise a mutation at amino acid D10, G12, and/or G17 as compared to a wild type SpCas9 as set forth in SEQ ID NO: 5783, or a corresponding mutation thereof. In some embodiments, the Cas9 polypeptide comprise a D10A mutation, a G12A mutation, and/or a G17A mutation as compared to a wild type SpCas9 as set forth in SEQ ID NO: 5783, or a corresponding mutation thereof.

[0198] In some embodiments, a prime editor comprises a Cas9 polypeptide having a mutation in the HNH domain that reduces or abolishes the nuclease activity of the HNH domain. In some embodiments, the Cas9 polypeptide comprise a mutation at amino acid H840 as compared to a wild type SpCas9 as set forth in SEQ ID NO: 5783, or a corresponding mutation thereof. In some embodiments, the Cas9 polypeptide comprise a H840A mutation as compared to a wild type SpCas9 as set forth in SEQ ID NO: 5783, or a corresponding mutation thereof. In some embodiments, the Cas9 polypeptide comprise a mutation at amino acid E762, D839, H840, N854, N856, N863, H982, H983, A984, D986, and/or a A987 as compared to a wild type SpCas9 as set forth in SEQ ID NO: 5783, or a corresponding mutation thereof. In some embodiments, the Cas9 polypeptide comprise a E762A, D839A, H840A, N854A, N856A, N863A, H982A, H983A, A984A, and/or a D986A mutation as compared to a wild type SpCas9 as set forth in SEQ ID NO: 5783, or a corresponding mutation thereof.

[0199] In some embodiments, a prime editor comprises a Cas9 having one or more amino acid substitutions in both the HNH domain and the RuvC domain that reduce or abolish the nuclease activity of both the HNH domain and the RuvC domain. In some embodiments, the prime editor comprises a nuclease inactive Cas9, or a nuclease dead Cas9 (dCas9). In some embodiments, the dCas9 comprises a H840X substitution and a D10X mutation compared to a wild type SpCas9 as set forth in SEQ ID NO: 5783 or corresponding mutations thereof, wherein X is any amino acid other than H for the H840X substitution and any amino acid other than D for the D10X substitution. In some embodiments, the dead Cas9 comprises a H840A and a D10A mutation as compared to a wild type SpCas9 as set forth in SEQ ID NO: 5783, or corresponding mutations thereof.

[0200] In some embodiments, a prime editor comprises a Cas protein, e.g., Cas9, containing modifications that allow altered PAM recognition. In prime editing using a Cas-protein-based prime editor, a “protospacer adjacent motif (PAM)”, PAM sequence, or PAM-like motif, may be used to refer to a short DNA sequence immediately following the protospacer sequence on the PAM strand of the target gene. In some embodiments, the PAM is recognized by the Cas nuclease in the prime editor during prime editing. In certain embodiments, the PAM is required for target binding of the Cas protein. The specific PAM sequence required for Cas protein recognition may depend on the specific type of the Cas protein. A PAM can be 1, 2, 3, 4, 5, 6, 7, 8, 9, 10 or more nucleotides in length. In some embodiments, a PAM is between 2-6 nucleotides in length. In some embodiments, the PAM can be a 5′ PAM (i.e., located upstream of the 5′ end of the protospacer). In other embodiments, the PAM can be a 3′ PAM (i.e., located downstream of the 5′ end of the protospacer). In some embodiments, the Cas protein of a prime editor recognizes a canonical PAM, for example, a SpCas9 recognizes 5′-NGG-3′ PAM. In some embodiments, the Cas protein of a prime editor has altered or non-canonical PAM specificities. Exemplary PAM sequences and corresponding Cas variants are described in Table 1 below. It should be appreciated that for each of the variants provided, the Cas protein comprises one or more of the amino acid substitutions as indicated compared to a wild type Cas protein sequence, for example, the Cas9 as set forth in SEQ ID NO: 5783. The PAM motifs as shown in Table 1 below are in the order of 5′ to 3′. As used in PAM sequences in Table 1, “N” refers to any one of nucleotides A, G, C, and T, “R” refers to nucleotide A or G, and “Y” refers to nucleotide C or T.

TABLE 1
Cas protein variants and corresponding PAM
sequences

| Variant | PAM |
|---|---|
| spCas9 (wild type) | NGG, NGA, NAG |
| spCas9-VRVRFRR | NG |
| R1335V/L1111R/D1135V/ | |
| G1218R/E1219F/A1322R/ | |
| T1337R | |
| spCas9-VQR (D1135V/ | NGA |
| R1335Q/T1337R) | |
| spCas9-EQR (D1135E/ | NGA |
| R1335Q/T1337R) | |
| spCas9-VRER (D1135V/ | NGCG |
| G1218R/R1335E/T1337R) | |
| xCas9 (E480K, E543D, | NGN |
| E1219V, K294R, Q1256K, | |
| A262T, S409I, M694I) | |
| SluCa9 | NNGG |
| saCas9 | NNGRRT |
| | (SEQ ID |
| | NO: 5820), |
| | NNGRRN |
| | (SEQ ID |
| | NO: 5821) |
| saCas9-KKH (E782K, | NNNRRT |
| N968K, R1015H) | (SEQ ID |
| | NO: 5822) |
| spCas9-MQKSER (D1135M, | NGCG/NGCN |
| S1136Q, G1218K, E1219S, | |
| R1335E, T1337R) | |
| spCas9-LRKIQK (D1135L, | NGTN |
| S1136R, G1218K, E1219I, | |
| R1335Q, T1337K) | |
| spCas9-LRVSQK (D1135L, | NGTN |
| S1136R, G1218V, E1219S, | |
| R1335Q, T1337K) | |
| spCas9-LRVSQL(D1135L, | NGTN |
| S1136R, G1218V, E1219S, | |
| R1335Q, T1337L) | |
| Cpf1 | TTTV |
| Spy-Mac | NAA |
| NmCas9 PAM | NNNNGATT |
| | (SEQ ID |
| | NO: 5823) |
| StCas9 PAM | NNAGAAW |
| | (SEQ ID |
| | NO: 5824) |
| TdCas9 PAM | NAAAAC |
| | (SEQ ID |
| | NO: 5825) |

[0201] In some embodiments, a prime editor comprises a Cas9 polypeptide comprising one or mutations selected from the group consisting of: A61R, L111R, D1135V, R221K, A262T, R324L, N394K, S4091, S4091, E427G, E480K, M495V, N497A, Y515N, K526E, F539S, E543D), R654L, R661A, R661L, R691A, N692A, M694A, M6941, Q695A, H698A, R753G, M7631, K848A, K890N, Q926A, K1003A, R1060A, L111R, R1114G, D11135E, D11135L, D11135N, S1136W, V11139A, D11180G, G1218K, G1218R, G1218S, E1219Q, E1219V, E1219V, Q1221H, P1249S, E1253K, N1317R, A1320V, P1321S, A1322R, 11322V, D1332G, R1332N, A1332R, R1333K, R1333P, R1335L, R1335Q, R1335V, T1337N, T1337R, S1338T, H1349R, and any combinations thereof as compared to a wildtype SpCas9 polypeptide as set forth in SEQ ID NO: 5783.

[0202] In some embodiments, a prime editor comprises a SaCas9 polypeptide. In some embodiments, the SaCas9 polypeptide comprises one or more of mutations E782K, N968K, and R10115H as compared to a wild type SaCas9. In some embodiments, a prime editor comprises a FnCas9 polypeptide, for example, a wildtype FnCas9 polypeptide or a FnCas9 polypeptide comprising one or more of mutations E1369R, E1449H, or R1556A as compared to the wild type FnCas9. In some embodiments, a prime editor comprises a Sc Cas9, for example, a wild type ScCas9 or a ScCas9 polypeptide comprises one or more of mutations I367K, G368D, I369K, H371L, T375S, T376G, and T1227K as compared to the wild type ScCas9. In some embodiments, a prime editor comprises a St1 Cas9 polypeptide, a St3 Cas9 polypeptide, or a Slu Cas9 polypeptide.

[0203] In some embodiments, a prime editor comprises a Cas polypeptide that comprises a circular permutant Cas variant. For example, a Cas9 polypeptide of a prime editor may be engineered such that the N-terminus and the C-terminus of a Cas9 protein (e.g., a wild type Cas9 protein, or a Cas9 nickase) are topically rearranged to retain the ability to bind DNA when complexed with a guide RNA (gRNA). An exemplary circular permutant configuration may be N-terminus-[original C-terminus]-[original N-terminus]-C-terminus. Any of the Cas9 proteins described herein, including any variant, ortholog, or naturally occurring Cas9 or equivalent thereof, may be reconfigured as a circular permutant variant.

[0204] Prime editors described herein may also comprise Cas proteins other than Cas9. For example, a prime editor as described herein may comprise a Cas12a (Cpf1) polypeptide or functional variants thereof. In some embodiments, the Cas12a polypeptide comprises a mutation that reduces or abolishes the endonuclease domain of the Cas12a polypeptide. In some embodiments, the Cas12a polypeptide is a Cas12a nickase. In some embodiments, the Cas protein comprises an amino acid sequence that comprises at least about 50%, 60%, 70%, 80%, 90%, 91%, 92%, 93%, 94%, 95%, 96%, 97%, 98%, 99%, or 100% sequence identity to a naturally occurring Cas12a polypeptide.

[0205] In some embodiments, a prime editor comprises a Cas protein that is a Cas12b (C2c1) or a Cas12c (C2c3) polypeptide. In some embodiments, the Cas protein comprises an amino acid sequence that comprises at least about 50%, 60%, 70%, 80%, 90%, 91%, 92%, 93%, 94%, 95%, 96%, 97%, 98%, 99%, or 100% sequence identity to a naturally occurring Cas12b (C2c1) or Cas12c (C2c3) protein. In some embodiments, the Cas protein is a Cas12b nickase or a Cas12c nickase. In some embodiments, the Cas protein is a Cas12e, a Cas12d, a Cas13, Cas14a, Cas14b, Cas14c, Cas14d, Cas14e, Cas14f, Cas14g, Cas14h, Cas14u, or a CasΦ polypeptide. In some embodiments, the Cas protein comprises an amino acid sequence that comprises at least about 50%, 60%, 70%, 80%, 90%, 91%, 92%, 93%, 94%, 95%, 96%, 97%, 98%, 99%, or 100% sequence identity to a naturally-occurring Cas12e, Cas12d, Cas13, Cas14a, Cas14b, Cas14c, Cas14d, Cas14e, Cas14f, Cas14g, Cas14h, Cas14u, or CasΦ protein. In some embodiments, the Cas protein is a Cas12e, Cas12d, Cas13, or Cas Φ nickase.

[0206] In some embodiments, a prime editor further comprises additional polypeptide components, for example, a flap endonuclease (FEN, e.g., FEN1). In some embodiments, the flap endonuclease excises the 5′ single stranded DNA of the edit strand of the target gene and assists incorporation of the intended nucleotide edit into the target gene. In some embodiments, the FEN is linked or fused to another component. In some embodiments, the FEN is provided in trans, for example, as a separate polypeptide or polynucleotide encoding the FEN.

[0207] In some embodiments, a prime editor further comprises one or more nuclear localization sequence (NLS). In some embodiments, the NLS helps promote translocation of a protein into the cell nucleus. In some embodiments, a prime editor comprises a fusion protein, e.g., a fusion protein comprising a DNA binding domain and a DNA polymerase, that comprises one or more NLSs. In some embodiments, one or more polypeptides of the prime editor are fused to or linked to one or more NLSs. In some embodiments, the prime editor comprises a DNA binding domain and a DNA polymerase domain that are provided in trans, wherein the DNA binding domain and/or the DNA polymerase domain is fused or linked to one or more NLSs.

[0208] In certain embodiments, a prime editor or prime editing complex comprises at least one NLS. In some embodiments, a prime editor or prime editing complex comprises at least two NLSs. In embodiments with at least two NLSs, the NLSs can be the same NLS, or they can be different NLSs.

[0209] Any NLSs that are known in the art are also contemplated herein. The NLSs may be any naturally occurring NLS, or any non-naturally occurring NLS (e.g., an NLS with one or more mutations relative to a wild-type NLS). In some embodiments, the one or more NLSs of a prime editor comprise bipartite NLSs. In some embodiments, the one or more NLSs of a prime editor are rich in lysine and arginine residues. In some embodiments, the one or more NLSs of a prime editor comprise proline residues. Non-limiting examples of NLS sequences are provided in Table 2 below.

TABLE 2
Exemplary nuclear localization sequences

| | | SEQ |
|---|---|---|
| | | ID |
| Description | Sequence | NO: |
| NLS of SV40 | PKKKRKV | 5826 |
| Large T-AG | | |
| NLS | MKRTADGSEFESPKKKRKV | 5827 |
| NLS | MDSLLMNRRKFLYQFKNVRWAKGRRETYLC | 5828 |
| NLS of | AVKRPAATKKAGQAKKKKLD | 5829 |
| Nucleoplasmin | | |
| NLS of EGL-13 | MSRRRKANPTKLSENAKKLAKEVEN | 5830 |
| NLS of C-Myc | PAAKRVKLD | 5831 |
| NLS of Tus- | KLKIKRPVK | 5832 |
| protein | | |
| NLS of polyoma | VSRKRPRP | 5833 |
| large T-AG | | |
| NLS of | EGAPPAKRAR | 5834 |
| Hepatitis | | |
| D virus | | |
| antigen | | |
| NLS of | PPQPKKKPLDGE | 5835 |
| murine p53 | | |
| NLS of PE1 | SGGSKRTADGSEFEPKKKRKV | 5836 |
| and PE2 | | |

[0210] In some embodiments, a prime editing complex comprises a fusion protein comprising a DNA binding domain (e.g., Cas9 (H840A)) and a reverse transcriptase (e.g., a variant MMLV RT) having the following structure: [NLS]-[Cas9(H840A)]-[linker]-[MMLV_RT(D200N)(T330P)(L603W)(T306K)(W313F)], and a desired PEgRNA. In some embodiments, the prime editing complex comprises a prime editor fusion protein that has the amino acid sequence of SEQ ID NO: 5837 or 5838. The sequences and components of these exemplary prime editor fusion proteins which are shown as follows:

TABLE 34A
Exemplary prime editor fusion protein and
component sequences.

| SEQ | | |
|---|---|---|
| ID | DESCRIP- | |
| NO | TION | SEQUENCE |
| 5837 | Prime | MKRTADGSEFESPKKKRKVDKKYSIGLD |
| | Editor | IGTNSVGWAVITDEYKVPSKKFKVLGNT |
| | Structure: | DRHSIKKNLIGALLFDSGETAEATRLKR |
| | [N- | TARRRYTRRKNRICYLQEIFSNEMAKVD |
| | terminal | DSFFHRLEESFLVEEDKKHERHPIFGNI |
| | NLS]- | VDEVAYHEKYPTIYHLRKKLVDSTDKAD |
| | [Cas9 | LRLIYLALAHMIKFRGHFLIEGDLNPDN |
| | (H840A)]- | SDVDKLFIQLVQTYNQLFEENPINASGV |
| | [LINKER]- | DAKAILSARLSKSRRLENLIAQLPGEKK |
| | [MMLV_RT | NGLFGNLIALSLGLTPNFKSNFDLAEDA |
| | (D200N) | KLQLSKDTYDDDLDNLLAQIGDQYADLF |
| | (T330P) | LAAKNLSDAILLSDILRVNTEITKAPLS |
| | (L603W) | ASMIKRYDEHHQDLTLLKALVRQQLPEK |
| | (T306K) | YKEIFFDQSKNGYAGYIDGGASQEEFYK |
| | (W313F)]- | FIKPILEKMDGTEELLVKLNREDLLRKQ |
| | [C- | RTFDNGSIPHQIHLGELHAILRRQEDFY |
| | terminal | PFLKDNREKIEKILTFRIPYYVGPLARG |
| | linker | NSRFAWMTRKSEETITPWNFEEVVDKGA |
| | and NLS] | SAQSFIERMTNFDKNLPNEKVLPKHSLL |
| | | YEYFTVYNELTKVKYVTEGMRKPAFLSG |
| | | EQKKAIVDLLFKTNRKVTVKQLKEDYFK |
| | | KIECFDSVEISGVEDRFNASLGTYHDLL |
| | | KIIKDKDFLDNEENEDILEDIVLTLTLF |
| | | EDREMIEERLKTYAHLFDDKVMKQLKRR |
| | | RYTGWGRLSRKLINGIRDKQSGKTILDF |
| | | LKSDGFANRNFMQLIHDDSLTFKEDIQK |
| | | AQVSGQGDSLHEHIANLAGSPAIKKGIL |
| | | QTVKVVDELVKVMGRHKPENIVIEMARE |
| | | NQTTQKGQKNSRERMKRIEEGIKELGSQ |
| | | ILKEHPVENTQLQNEKLYLYYLQNGRDM |
| | | YVDQELDINRLSDYDVDAIVPQSFLKDD |
| | | SIDNKVLTRSDKNRGKSDNVPSEEVVKK |
| | | MKNYWRQLLNAKLITQRKFDNLTKAERG |
| | | GLSELDKAGFIKRQLVETRQITKHVAQI |
| | | LDSRMNTKYDENDKLIREVKVITLKSKL |
| | | VSDFRKDFQFYKVREINNYHHAHDAYLN |
| | | AVVGTALIKKYPKLESEFVYGDYKVYDV |
| | | RKMIAKSEQEIGKATAKYFFYSNIMNFF |
| | | KTEITLANGEIRKRPLIETNGETGEIVW |
| | | DKGRDFATVRKVLSMPQVNIVKKTEVQT |
| | | GGFSKESILPKRNSDKLIARKKDWDPKK |
| | | YGGFDSPTVAYSVLVVAKVEKGKSKKLK |
| | | SVKELLGITIMERSSFEKNPIDFLEAKG |
| | | YKEVKKDLIIKLPKYSLFELENGRKRML |
| | | ASAGELQKGNELALPSKYVNFLYLASHY |
| | | EKLKGSPEDNEQKQLFVEQHKHYLDEII |
| | | EQISEFSKRVILADANLDKVLSAYNKHR |
| | | DKPIREQAENIIHLFTLTNLGAPAAFKY |
| | | FDTTIDRKRYTSTKEVLDATLIHQSITG |
| | | LYETRIDLSQLGGD |
| | | [symbol] |
| | | [symbol] |
| | | TLNIEDEYRLHETSKEPDVSLGSTWLSD |
| | | FPQAWAETGGMGLAVRQAPLIIPLKATS |
| | | TPVSIKQYPMSQEARLGIKPHIQRLLDQ |
| | | GILVPCQSPWNTPLLPVKKPGTNDYRPV |
| | | QDLREVNKRVEDIHPTVPNPYNLLSGLP |
| | | PSHQWYTVLDLKDAFFCLRLHPTSQPLF |
| | | AFEWRDPEMGISGQLTWTRLPQGFKNSP |
| | | TLFNEALHRDLADFRIQHPDLILLQYVD |
| | | DLLLAATSELDCQQGTRALLQTLGNLGY |
| | | RASAKKAQICQKQVKYLGYLLKEGQRWL |
| | | TEARKETVMGQPTPKTPRQLREFLGKAG |
| | | FCRLFIPGFAEMAAPLYPLTKPGTLFNW |
| | | GPDQQKAYQEIKQALLTAPALGLPDLTK |
| | | PFELFVDEKQGYAKGVLTQKLGPWRRPV |
| | | AYLSKKLDPVAAGWPPCLRMVAAIAVLT |
| | | KDAGKLTMGQPLVILAPHAVEALVKQPP |
| | | DRWLSNARMTHYQALLLDTDRVQFGPVV |
| | | ALNPATLLPLPEEGLQHNCLDILAEAHG |
| | | TRPDLTDQPLPDADHTWYTDGSSLLQEG |
| | | QRKAGAAVTTETEVIWAKALPAGTSAQR |
| | | AELIALTQALKMAEGKKLNVYTDSRYAF |
| | | ATAHIHGEIYRRRGWLTSEGKEIKNKDE |
| | | ILALLKALFLPKRLSIIHCPGHQKGHSA |
| | | EARGNRMADQAARKAAITETPDTSTLLI |
| | | ENSSP |
| | | SGGSKRTADGSEFEPKKKRKV |
| 5827 | N | MKRTADGSEFESPKKKRKV |
| | terminal | |
| | NLS | |
| 5786 | SpCas9 | DKKYSIGLDIGTNSVGWAVITDEYKVPS |
| | (H840A) | KKFKVLGNTDRHSIKKNLIGALLFDSGE |
| | | TAEATRLKRTARRRYTRRKNRICYLQEI |
| | | FSNEMAKVDDSFFHRLEESFLVEEDKKH |
| | | ERHPIFGNIVDEVAYHEKYPTIYHLRKK |
| | | LVDSTDKADLRLIYLALAHMIKFRGHFL |
| | | IEGDLNPDNSDVDKLFIQLVQTYNQLFE |
| | | ENPINASGVDAKAILSARLSKSRRLENL |
| | | IAQLPGEKKNGLFGNLIALSLGLTPNFK |
| | | SNFDLAEDAKLQLSKDTYDDDLDNLLAQ |
| | | IGDQYADLFLAAKNLSDAILLSDILRVN |
| | | TEITKAPLSASMIKRYDEHHQDLTLLKA |
| | | LVRQQLPEKYKEIFFDQSKNGYAGYIDG |
| | | GASQEEFYKFIKPILEKMDGTEELLVKL |
| | | NREDLLRKQRTFDNGSIPHQIHLGELHA |
| | | ILRRQEDFYPFLKDNREKIEKILTFRIP |
| | | YYVGPLARGNSRFAWMTRKSEETITPWN |
| | | FEEVVDKGASAQSFIERMTNFDKNLPNE |
| | | KVLPKHSLLYEYFTVYNELTKVKYVTEG |
| | | MRKPAFLSGEQKKAIVDLLFKTNRKVTV |
| | | KQLKEDYFKKIECFDSVEISGVEDRFNA |
| | | SLGTYHDLLKIIKDKDFLDNEENEDILE |
| | | DIVLTLTLFEDREMIEERLKTYAHLFDD |
| | | KVMKQLKRRRYTGWGRLSRKLINGIRDK |
| | | QSGKTILDFLKSDGFANRNFMQLIHDDS |
| | | LTFKEDIQKAQVSGQGDSLHEHIANLAG |
| | | SPAIKKGILQTVKVVDELVKVMGRHKPE |
| | | NIVIEMARENQTTQKGQKNSRERMKRIE |
| | | EGIKELGSQILKEHPVENTQLQNEKLYL |
| | | YYLQNGRDMYVDQELDINRLSDYDVDAI |
| | | VPQSFLKDDSIDNKVLTRSDKNRGKSDN |
| | | VPSEEVVKKMKNYWRQLLNAKLITQRKF |
| | | DNLTKAERGGLSELDKAGFIKRQLVETR |
| | | QITKHVAQILDSRMNTKYDENDKLIREV |
| | | KVITLKSKLVSDFRKDFQFYKVREINNY |
| | | HHAHDAYLNAVVGTALIKKYPKLESEFV |
| | | YGDYKVYDVRKMIAKSEQEIGKATAKYF |
| | | FYSNIMNFFKTEITLANGEIRKRPLIET |
| | | NGETGEIVWDKGRDFATVRKVLSMPQVN |
| | | IVKKTEVQTGGFSKESILPKRNSDKLIA |
| | | RKKDWDPKKYGGFDSPTVAYSVLVVAKV |
| | | EKGKSKKLKSVKELLGITIMERSSFEKN |
| | | PIDFLEAKGYKEVKKDLIIKLPKYSLFE |
| | | LENGRKRMLASAGELQKGNELALPSKYV |
| | | NFLYLASHYEKLKGSPEDNEQKQLFVEQ |
| | | HKHYLDEIIEQISEFSKRVILADANLDK |
| | | VLSAYNKHRDKPIREQAENIIHLFTLTN |
| | | LGAPAAFKYFDTTIDRKRYTSTKEVLDA |
| | | TLIHQSITGLYETRIDLSQLGGD |
| 5852 | LINKER | SGGSSGGSSGSETPGTSESATPESSGGS |
| | | SGGSS |
| 5842 | MMLV_ | TLNIEDEYRLHETSKEPDVSLGSTWLSD |
| | RT | FPQAWAETGGMGLAVRQAPLIIPLKATS |
| | (D200N) | TPVSIKQYPMSQEARLGIKPHIQRLLDQ |
| | (T330P) | GILVPCQSPWNTPLLPVKKPGTNDYRPV |
| | (L603W) | QDLREVNKRVEDIHPTVPNPYNLLSGLP |
| | (T306K) | PSHQWYTVLDLKDAFFCLRLHPTSQPLF |
| | (W313F) | AFEWRDPEMGISGQLTWTRLPQGFKNSP |
| | | TLFNEALHRDLADFRIQHPDLILLQYVD |
| | | DLLLAATSELDCQQGTRALLQTLGNLGY |
| | | RASAKKAQICQKQVKYLGYLLKEGQRWL |
| | | TEARKETVMGQPTPKTPRQLREFLGKAG |
| | | FCRLFIPGFAEMAAPLYPLTKPGTLFNW |
| | | GPDQQKAYQEIKQALLTAPALGLPDLTK |
| | | PFELFVDEKQGYAKGVLTQKLGPWRRPV |
| | | AYLSKKLDPVAAGWPPCLRMVAAIAVLT |
| | | KDAGKLTMGQPLVILAPHAVEALVKQPP |
| | | DRWLSNARMTHYQALLLDTDRVQFGPVV |
| | | ALNPATLLPLPEEGLQHNCLDILAEAHG |
| | | TRPDLTDQPLPDADHTWYTDGSSLLQEG |
| | | QRKAGAAVTTETEVIWAKALPAGTSAQR |
| | | AELIALTQALKMAEGKKLNVYTDSRYAF |
| | | ATAHIHGEIYRRRGWLTSEGKEIKNKDE |
| | | ILALLKALFLPKRLSIIHCPGHQKGHSA |
| | | EARGNRMADQAARKAAITETPDTSTLLI |
| | | ENSSP |
| 5836 | C- | SGGSKRTADGSEFEPKKKRKV |
| | Terminal | |
| | linker | |
| | and NLS | |

TABLE 34B
Exemplary prime editor fusion protein and
component sequences.

| SEQ | | |
|---|---|---|
| ID | DESCRIP- | |
| NO | TION | SEQUENCE |
| 5838 | PEmax | MKRTADGSEFESPKKKRKV |
| | Prime | DKKYSIGLDIGTNSVGWAVITDEYKVP |
| | Editor | SKKFKVLGNTDRHSIKKNLIGALLFDS |
| | structure: | GETAEATRLKRTARRRYTRRKNRICYL |
| | [N- | QEIFSNEMAKVDDSFFHRLEESFLVEE |
| | terminal | DKKHERHPIFGNIVDEVAYHEKYPTIY |
| | NLS]- | HLRKKLVDSTDKADLRLIYLALAHMIK |
| | [Cas9 | FRGHFLIEGDLNPDNSDVDKLFIQLVQ |
| | ((R221K | TYNQLFEENPINASGVDAKAILSARLS |
| | N394K | KSRKLENLIAQLPGEKKNGLFGNLIAL |
| | H840A)]- | SLGLTPNFKSNFDLAEDAKLQLSKDTY |
| | [SGGSx2- | DDDLDNLLAQIGDQYADLFLAAKNLSD |
| | bpSV40NLS- | AILLSDILRVNTEITKAPLSASMIKRY |
| | SGGSx2]- | DEHHQDLTLLKALVRQQLPEKYKEIFF |
| | [MMLV_RT | DQSKNGYAGYIDGGASQEEFYKFIKPI |
| | (D200N) | LEKMDGTEELLVKLKREDLLRKQRTFD |
| | (T330P) | NGSIPHQIHLGELHAILRRQEDFYPFL |
| | (L603W) | KDNREKIEKILTFRIPYYVGPLARGNS |
| | (T306K) | RFAWMTRKSEETITPWNFEEVVDKGAS |
| | (W313F)]- | AQSFIERMTNFDKNLPNEKVLPKHSLL |
| | [C- | YEYFTVYNELTKVKYVTEGMRKPAFLS |
| | terminal | GEQKKAIVDLLFKTNRKVTVKQLKEDY |
| | linker | FKKIECFDSVEISGVEDRFNASLGTYH |
| | and NLS- | DLLKIIKDKDFLDNEENEDILEDIVLT |
| | linker- | LTLFEDREMIEERLKTYAHLFDDKVMK |
| | NLS2] | QLKRRRYTGWGRLSRKLINGIRDKQSG |
| | | KTILDFLKSDGFANRNFMQLIHDDSLT |
| | | FKEDIQKAQVSGQGDSLHEHIANLAGS |
| | | PAIKKGILQTVKVVDELVKVMGRHKPE |
| | | NIVIEMARENQTTQKGQKNSRERMKRI |
| | | EEGIKELGSQILKEHPVENTQLQNEKL |
| | | YLYYLQNGRDMYVDQELDINRLSDYDV |
| | | DAIVPQSFLKDDSIDNKVLTRSDKNRG |
| | | KSDNVPSEEVVKKMKNYWRQLLNAKLI |
| | | TQRKFDNLTKAERGGLSELDKAGFIKR |
| | | QLVETRQITKHVAQILDSRMNTKYDEN |
| | | DKLIREVKVITLKSKLVSDFRKDFQFY |
| | | KVREINNYHHAHDAYLNAVVGTALIKK |
| | | YPKLESEFVYGDYKVYDVRKMIAKSEQ |
| | | EIGKATAKYFFYSNIMNFFKTEITLAN |
| | | GEIRKRPLIETNGETGEIVWDKGRDFA |
| | | TVRKVLSMPQVNIVKKTEVQTGGFSKE |
| | | SILPKRNSDKLIARKKDWDPKKYGGFD |
| | | SPTVAYSVLVVAKVEKGKSKKLKSVKE |
| | | LLGITIMERSSFEKNPIDFLEAKGYKE |
| | | VKKDLIIKLPKYSLFELENGRKRMLAS |
| | | AGELQKGNELALPSKYVNFLYLASHYE |
| | | KLKGSPEDNEQKQLFVEQHKHYLDEII |
| | | EQISEFSKRVILADANLDKVLSAYNKH |
| | | RDKPIREQAENIIHLFTLTNLGAPAAF |
| | | KYFDTTIDRKRYTSTKEVLDATLIHQS |
| | | ITGLYETRIDLSQLGGD |
| | | [symbol] |
| | | [symbol] |
| | | TLNIEDEYRLHETSKEPDVSLGSTWLS |
| | | DFPQAWAETGGMGLAVRQAPLIIPLKA |
| | | TSTPVSIKQYPMSQEARLGIKPHIQRL |
| | | LDQGILVPCQSPWNTPLLPVKKPGTND |
| | | YRPVQDLREVNKRVEDIHPTVPNPYNL |
| | | LSGLPPSHQWYTVLDLKDAFFCLRLHP |
| | | TSQPLFAFEWRDPEMGISGQLTWTRLP |
| | | QGFKNSPTLFNEALHRDLADFRIQHPD |
| | | LILLQYVDDLLLAATSELDCQQGTRAL |
| | | LQTLGNLGYRASAKKAQICQKQVKYLG |
| | | YLLKEGQRWLTEARKETVMGQPTPKTP |
| | | RQLREFLGKAGFCRLFIPGFAEMAAPL |
| | | YPLTKPGTLFNWGPDQQKAYQEIKQAL |
| | | LTAPALGLPDLTKPFELFVDEKQGYAK |
| | | GVLTQKLGPWRRPVAYLSKKLDPVAAG |
| | | WPPCLRMVAAIAVLTKDAGKLTMGQPL |
| | | VILAPHAVEALVKQPPDRWLSNARMTH |
| | | YQALLLDTDRVQFGPVVALNPATLLPL |
| | | PEEGLQHNCLDILAEAHGTRPDLTDQP |
| | | LPDADHTWYTDGSSLLQEGQRKAGAAV |
| | | TTETEVIWAKALPAGTSAQRAELIALT |
| | | QALKMAEGKKLNVYTDSRYAFATAHIH |
| | | GEIYRRRGWLTSEGKEIKNKDEILALL |
| | | KALFLPKRLSIIHCPGHQKGHSAEARG |
| | | NRMADQAARKAAITETPDTSTLLIENS |
| | | SP |
| | | SGGSKRTADGSEFESPKKKRKVGS |
| | | GPAAKRVKLD |
| 5839 | PEmax- | MKRTADGSEFESPKKKRKV |
| | N- | |
| | terminal | |
| | bpSV40NLS | |
| 5840 | PEmax- | DKKYSIGLDIGTNSVGWAVITDEYKVP |
| | CAS9 | SKKFKVLGNTDRHSIKKNLIGALLFDS |
| | (R221K | GETAEATRLKRTARRRYTRRKNRICYL |
| | N394K | QEIFSNEMAKVDDSFFHRLEESFLVEE |
| | H840A) | DKKHERHPIFGNIVDEVAYHEKYPTIY |
| | (not | HLRKKLVDSTDKADLRLIYLALAHMIK |
| | including | FRGHFLIEGDLNPDNSDVDKLFIQLVQ |
| | N- | TYNQLFEENPINASGVDAKAILSARLS |
| | terminal | KSRKLENLIAQLPGEKKNGLFGNLIAL |
| | Met in | SLGLTPNFKSNFDLAEDAKLQLSKDTY |
| | Cas9) | DDDLDNLLAQIGDQYADLFLAAKNLSD |
| | | AILLSDILRVNTEITKAPLSASMIKRY |
| | | DEHHQDLTLLKALVRQQLPEKYKEIFF |
| | | DQSKNGYAGYIDGGASQEEFYKFIKPI |
| | | LEKMDGTEELLVKLKREDLLRKQRTFD |
| | | NGSIPHQIHLGELHAILRRQEDFYPFL |
| | | KDNREKIEKILTFRIPYYVGPLARGNS |
| | | RFAWMTRKSEETITPWNFEEVVDKGAS |
| | | AQSFIERMTNFDKNLPNEKVLPKHSLL |
| | | YEYFTVYNELTKVKYVTEGMRKPAFLS |
| | | GEQKKAIVDLLFKTNRKVTVKQLKEDY |
| | | FKKIECFDSVEISGVEDRFNASLGTYH |
| | | DLLKIIKDKDFLDNEENEDILEDIVLT |
| | | LTLFEDREMIEERLKTYAHLFDDKVMK |
| | | QLKRRRYTGWGRLSRKLINGIRDKQSG |
| | | KTILDFLKSDGFANRNFMQLIHDDSLT |
| | | FKEDIQKAQVSGQGDSLHEHIANLAGS |
| | | PAIKKGILQTVKVVDELVKVMGRHKPE |
| | | NIVIEMARENQTTQKGQKNSRERMKRI |
| | | EEGIKELGSQILKEHPVENTQLQNEKL |
| | | YLYYLQNGRDMYVDQELDINRLSDYDV |
| | | DAIVPQSFLKDDSIDNKVLTRSDKNRG |
| | | KSDNVPSEEVVKKMKNYWRQLLNAKLI |
| | | TQRKFDNLTKAERGGLSELDKAGFIKR |
| | | QLVETRQITKHVAQILDSRMNTKYDEN |
| | | DKLIREVKVITLKSKLVSDFRKDFQFY |
| | | KVREINNYHHAHDAYLNAVVGTALIKK |
| | | YPKLESEFVYGDYKVYDVRKMIAKSEQ |
| | | EIGKATAKYFFYSNIMNFFKTEITLAN |
| | | GEIRKRPLIETNGETGEIVWDKGRDFA |
| | | TVRKVLSMPQVNIVKKTEVQTGGFSKE |
| | | SILPKRNSDKLIARKKDWDPKKYGGFD |
| | | SPTVAYSVLVVAKVEKGKSKKLKSVKE |
| | | LLGITIMERSSFEKNPIDFLEAKGYKE |
| | | VKKDLIIKLPKYSLFELENGRKRMLAS |
| | | AGELQKGNELALPSKYVNFLYLASHYE |
| | | KLKGSPEDNEQKQLFVEQHKHYLDEII |
| | | EQISEFSKRVILADANLDKVLSAYNKH |
| | | RDKPIREQAENIIHLFTLTNLGAPAAF |
| | | KYFDTTIDRKRYTSTKEVLDATLIHQS |
| | | ITGLYETRIDLSQLGGD |
| 5841 | PEmax- | SGGSSGGSKRTADGSEFESPKKKRKVS |
| | SGGSx2- | GGSSGGS |
| | bpSV40NLS- | |
| | SGGSx2 | |
| | linker | |
| 5842 | PEmax- | TLNIEDEYRLHETSKEPDVSLGSTWLS |
| | MMLV RT | DFPQAWAETGGMGLAVRQAPLIIPLKA |
| | D200N | TSTPVSIKQYPMSQEARLGIKPHIQRL |
| | T330P | LDQGILVPCQSPWNTPLLPVKKPGTND |
| | L603W | YRPVQDLREVNKRVEDIHPTVPNPYNL |
| | T306K | LSGLPPSHQWYTVLDLKDAFFCLRLHP |
| | W313F | TSQPLFAFEWRDPEMGISGQLTWTRLP |
| | | QGFKNSPTLFNEALHRDLADFRIQHPD |
| | | LILLQYVDDLLLAATSELDCQQGTRAL |
| | | LQTLGNLGYRASAKKAQICQKQVKYLG |
| | | YLLKEGQRWLTEARKETVMGQPTPKTP |
| | | RQLREFLGKAGFCRLFIPGFAEMAAPL |
| | | YPLTKPGTLFNWGPDQQKAYQEIKQAL |
| | | LTAPALGLPDLTKPFELFVDEKQGYAK |
| | | GVLTQKLGPWRRPVAYLSKKLDPVAAG |
| | | WPPCLRMVAAIAVLTKDAGKLTMGQPL |
| | | VILAPHAVEALVKQPPDRWLSNARMTH |
| | | YQALLLDTDRVQFGPVVALNPATLLPL |
| | | PEEGLQHNCLDILAEAHGTRPDLTDQP |
| | | LPDADHTWYTDGSSLLQEGQRKAGAAV |
| | | TTETEVIWAKALPAGTSAQRAELIALT |
| | | QALKMAEGKKLNVYTDSRYAFATAHIH |
| | | GEIYRRRGWLTSEGKEIKNKDEILALL |
| | | KALFLPKRLSIIHCPGHQKGHSAEARG |
| | | NRMADQAARKAAITETPDTSTLLIENS |
| | | SP |
| 5843 | PEmax- | SGGSKRTADGSEFESPKKKRKV |
| | C- | |
| | terminal | |
| | linker- | |
| | NLS | |
| 5844 | PEmax- | GSGPAAKRVKLD |
| | C- | |
| | terminal | |
| | linker- | |
| | NLS2 | |

[0211] Polypeptides comprising components of a prime editor may be fused via peptide linkers, or may be provided in trans relevant to each other. For example, a reverse transcriptase may be expressed, delivered, or otherwise provided as an individual component rather than as a part of a fusion protein with the DNA binding domain. In such cases, components of the prime editor may be associated through non-peptide linkages or co-localization functions. In some embodiments, a prime editor further comprises additional components capable of interacting with, associating with, or capable of recruiting other components of the prime editor or the prime editing system. For example, a prime editor may comprise an RNA-protein recruitment polypeptide that can associate with an RNA-protein recruitment RNA aptamer. In some embodiments, an RNA-protein recruitment polypeptide can recruit, or be recruited by, a specific RNA sequence. Non limiting examples of RNA-protein recruitment polypeptide and RNA aptamer pairs include a MS2 coat protein and a MS2 RNA hairpin, a PCP polypeptide and a PP7 RNA hairpin, a Com polypeptide and a Com RNA hairpin, a Ku protein and a telomerase Ku binding RNA motif, and a Sm7 protein and a telomerase Sm7 binding RNA motif. In some embodiments, the prime editor comprises a DNA binding domain fused or linked to an RNA-protein recruitment polypeptide. In some embodiments, the prime editor comprises a DNA polymerase domain fused or linked to an RNA-protein recruitment polypeptide. In some embodiments, the DNA binding domain and the DNA polymerase domain fused to the RNA-protein recruitment polypeptide, or the DNA binding domain fused to the RNA-protein recruitment polypeptide and the DNA polymerase domain are co-localized by the corresponding RNA-protein recruitment RNA aptamer of the RNA-protein recruitment polypeptide. In some embodiments, the corresponding RNA-protein recruitment RNA aptamer fused or linked to a portion of the PEgRNA or ngRNA. For example, an MS2 coat protein fused or linked to the DNA polymerase and a MS2 hairpin installed on the PEgRNA for co-localization of the DNA polymerase and the RNA-guided DNA binding domain (e.g., a Cas9 nickase).

[0212] In certain embodiments, components of a prime editor are directly fused to each other. In certain embodiments, components of a prime editor are associated to each other via a linker.

[0213] As used herein, a linker can be any chemical group or a molecule linking two molecules or moieties, e.g., a DNA binding domain and a polymerase domain of a prime editor. In some embodiments, a linker is an organic molecule, group, polymer, or chemical moiety. In some embodiments, the linker comprises a non-peptide moiety. The linker may be as simple as a covalent bond, or it may be a polymeric linker many atoms in length, for example, a polynucleotide sequence. In certain embodiments, the linker is a covalent bond (e.g., a carbon-carbon bond, disulfide bond, carbon-heteroatom bond, etc.).

[0214] In certain embodiments, two or more components of a prime editor are linked to each other by a peptide linker. In some embodiments, a peptide linker is 5-100 amino acids in length, for example, 2, 3, 4, 5, 6, 7, 8, 9, 10, 11, 12, 13, 14, 15, 16, 17, 18, 19, 20, 21, 22, 23, 24, 25, 26, 27, 28, 29, 30, 30-35, 35-40, 40-45, 45-50, 50-60, 60-70, 70-80, 80-90, 90-100, 100-150, or 150-200 amino acids in length. In some embodiments, the peptide linker is 16 amino acids in length, 24 amino acids in length, 64 amino acids in length, or 96 amino acids in length.

[0215] In some embodiments, the linker comprises the amino acid sequence (GGGGS)n (SEQ ID NO: 5845), (G)n (SEQ ID NO: 5846), (EAAAK)n (SEQ ID NO: 5847), (GGS)n (SEQ ID NO: 5848), (SGGS)n (SEQ ID NO: 5849), (XP)n (SEQ ID NO: 5850), or any combination thereof, wherein n is independently an integer between 1 and 30, and wherein X is any amino acid. In some embodiments, the linker comprises the amino acid sequence (GGS)n (SEQ ID NO: 5903), wherein n is 1, 3, or 7. In some embodiments, the linker comprises the amino acid sequence SGSETPGTSESATPES (SEQ ID NO: 5851). In some embodiments, the linker comprises the amino acid sequence SGGSSGGSSGSETPGTSESATPESSGGSSGGS (SEQ ID NO: 5852). In some embodiments, the linker comprises the amino acid sequence SGGSGGSGGS (SEQ ID NO: 5854). In some embodiments, the linker comprises the amino acid sequence SGGS (SEQ ID NO: 5855). In other embodiments, the linker comprises the amino acid sequence SGGSSGGSSGSETPGTSESATPESAGSYPYDVPDYAGSAAPAAKKKKLDGSGSGGSSGGS (SEQ ID NO: 5856).

[0216] In certain embodiments, two or more components of a prime editor are linked to each other by a non-peptide linker. In some embodiments, the linker is a carbon-nitrogen bond of an amide linkage. In certain embodiments, the linker is a cyclic or acyclic, substituted or unsubstituted, branched or unbranched aliphatic or heteroaliphatic linker. In certain embodiments, the linker is polymeric (e.g., polyethylene, polyethylene glycol, polyamide, polyester, etc.). In certain embodiments, the linker comprises a monomer, dimer, or polymer of aminoalkanoic acid. In certain embodiments, the linker comprises an aminoalkanoic acid (e.g., glycine, ethanoic acid, alanine, beta-alanine, 3-aminopropanoic acid, 4-aminobutanoic acid, 5-pentanoic acid, etc.). In certain embodiments, the linker comprises a monomer, dimer, or polymer of aminohexanoic acid (Ahx). In certain embodiments, the linker is based on a carbocyclic moiety (e.g., cyclopentane, cyclohexane). In other embodiments, the linker comprises a polyethylene glycol moiety (PEG). In certain embodiments, the linker comprises an aryl or heteroaryl moiety. In certain embodiments, the linker is based on a phenyl ring. The linker may include functionalized moieties to facilitate attachment of a nucleophile (e.g., thiol, amino) from the peptide to the linker. Any electrophile may be used as part of the linker. Exemplary electrophiles include, but are not limited to, activated esters, activated amides, Michael acceptors, alkyl halides, aryl halides, acyl halides, and isothiocyanates.

[0217] Components of a prime editor may be connected to each other in any order. In some embodiments, the DNA binding domain and the DNA polymerase domain of a prime editor may be fused to form a fusion protein, or may be joined by a peptide or protein linker, in any order from the N terminus to the C terminus. In some embodiments, a prime editor comprises a DNA binding domain fused or linked to the C-terminal end of a DNA polymerase domain. In some embodiments, a prime editor comprises a DNA binding domain fused or linked to the N-terminal end of a DNA polymerase domain. In some embodiments, the prime editor comprises a fusion protein comprising the structure NH2-[DNA binding domain]-[polymerase]-COOH; or NH2-[polymerase]-[DNA binding domain]-COOH, wherein each instance of “]-[” indicates the presence of an optional linker sequence. In some embodiments, a prime editor comprises a fusion protein and a DNA polymerase domain provided in trans, wherein the fusion protein comprises the structure NH2-[DNA binding domain]-[RNA-protein recruitment polypeptide]-COOH. In some embodiments, a prime editor comprises a fusion protein and a DNA binding domain provided in trans, wherein the fusion protein comprises the structure NH2-[DNA polymerase domain]-[RNA-protein recruitment polypeptide]-COOH.

[0218] In addition, the NLSs may be expressed as part of a prime editor complex. The location of the NLS fusion can be at the N-terminus, the C-terminus, or positioned anywhere within a sequence of a prime editor or a component thereof (e.g., inserted between the DNA-binding domain and the DNA polymerase domain of a prime editor fusion protein, between the DNA binding domain and a linker sequence, between a DNA polymerase and a linker sequence, between two linker sequences of a prime editor fusion protein or a component thereof, in either N-terminus to C-terminus or C-terminus to N-terminus order). In some embodiments, a prime editor is fusion protein that comprises an NLS at the N terminus. In some embodiments, a prime editor is fusion protein that comprises an NLS at the C terminus. In some embodiments, a prime editor is fusion protein that comprises at least one NLS at both the N terminus and the C terminus. In some embodiments, the prime editor is a fusion protein that comprises two NLSs at the N terminus and/or the C terminus.

[0219] In some embodiments, a prime editor fusion protein, a polypeptide component of a prime editor, or a polynucleotide encoding the prime editor fusion protein or polypeptide component, may be split into an N-terminal half and a C-terminal half or polypeptides that encode the N-terminal half and the C terminal half, and provided to a target DNA in a cell separately. For example, in certain embodiments, a prime editor fusion protein may be split into a N-terminal and a C-terminal half for separate delivery in AAV vectors, and subsequently translated and colocalized in a target cell to reform the complete polypeptide or prime editor protein. In such cases, separate halves of a protein or a fusion protein may each comprise a split-intein to facilitate colocalization and reformation of the complete protein or fusion protein by the mechanism of intein facilitated trans splicing. In some embodiments, a prime editor comprises a N-terminal half fused to an intein-N, and a C-terminal half fused to an intein-C, or polynucleotides or vectors (e.g. AAV vectors) encoding each thereof. When delivered and/or expressed in a target cell, the intein-N and the intein-C can be excised via protein trans-splicing, resulting in a complete prime editor fusion protein in the target cell.

### PEgRNA for Editing of ATP7B Gene

[0220] The term “prime editing guide RNA”, or “PEgRNA”, refers to a guide polynucleotide that comprises one or more intended nucleotide edits for incorporation into the target DNA. In some embodiments, the PEgRNA associates with and directs a prime editor to incorporate the one or more intended nucleotide edits into the target gene via prime editing. “Nucleotide edit” or “intended nucleotide edit” refers to a specified deletion of one or more nucleotides at one specific position, insertion of one or more nucleotides at one specific position, substitution of a single nucleotide, or other alterations at one specific position to be incorporated into the sequence of the target gene. Intended nucleotide edit may refer to the edit on the editing template as compared to the sequence on the target strand of the target gene or may refer to the edit encoded by the editing template on the newly synthesized single stranded DNA that replaces the editing target sequence, as compared to the editing target sequence. In some embodiments, a PEgRNA comprises a spacer sequence that is complementary or substantially complementary to a search target sequence on a target strand of the target gene. In some embodiments, the PEgRNA comprises a gRNA core that associates with a DNA binding domain, e.g., a CRISPR-Cas protein domain, of a prime editor. In some embodiments, the PEgRNA further comprises an extended nucleotide sequence comprising one or more intended nucleotide edits compared to the endogenous sequence of the target gene, wherein the extended nucleotide sequence may be referred to as an extension arm.

[0221] In certain embodiments, the extension arm comprises a primer binding site sequence (PBS) that can initiate target-primed DNA synthesis. In some embodiments, the PBS is complementary or substantially complementary to a free 3′ end on the edit strand of the target gene at a nick site generated by the prime editor. In some embodiments, the extension arm further comprises an editing template that comprises one or more intended nucleotide edits to be incorporated in the target gene by prime editing. In some embodiments, the editing template is a template for an RNA-dependent DNA polymerase domain or polypeptide of the prime editor, for example, a reverse transcriptase domain. The reverse transcriptase editing template may also be referred to herein as an RT template, or RTT. In some embodiments, the editing template comprises partial complementarity to an editing target sequence in the target gene. e.g., an ATP7B gene. In some embodiments, the editing template comprises substantial or partial complementarity to the editing target sequence except at the position of the intended nucleotide edits to be incorporated into the target gene. An exemplary architecture of a PEgRNA including its components is as demonstrated in FIG. 2.

[0222] In some embodiments, a PEgRNA includes only RNA nucleotides and forms an RNA polynucleotide. In some embodiments, a PEgRNA is a chimeric polynucleotide that includes both RNA and DNA nucleotides. For example, a PEgRNA can include DNA in the spacer sequence, the gRNA core, or the extension arm. In some embodiments, a PEgRNA comprises DNA in the spacer sequence. In some embodiments, the entire spacer sequence of a PEgRNA is a DNA sequence. In some embodiments, the PEgRNA comprises DNA in the gRNA core, for example, in a stem region of the gRNA core. In some embodiments, the PEgRNA comprises DNA in the extension arm, for example, in the editing template. An editing template that comprises a DNA sequence may serve as a DNA synthesis template for a DNA polymerase in a prime editor, for example, a DNA-dependent DNA polymerase. Accordingly, the PEgRNA may be a chimeric polynucleotide that comprises RNA in the spacer, gRNA core, and/or the PBS sequences and DNA in the editing template.

[0223] Components of a PEgRNA may be arranged in a modular fashion. In some embodiments, the spacer and the extension arm comprising a primer binding site sequence (PBS) and an editing template, e.g., a reverse transcriptase template (RTT), can be interchangeably located in the 5′ portion of the PEgRNA, the 3′ portion of the PEgRNA, or in the middle of the gRNA core. In some embodiments, a PEgRNA comprises a PBS and an editing template sequence in 5′ to 3′ order. In some embodiments, the gRNA core of a PEgRNA of this disclosure may be located in between a spacer and an extension arm of the PEgRNA. In some embodiments, the gRNA core of a PEgRNA may be located at the 3′ end of a spacer. In some embodiments, the gRNA core of a PEgRNA may be located at the 5′ end of a spacer. In some embodiments, the gRNA core of a PEgRNA may be located at the 3′ end of an extension arm. In some embodiments, the gRNA core of a PEgRNA may be located at the 5′ end of an extension arm. In some embodiments, the PEgRNA comprises, from 5′ to 3′: a spacer, a gRNA core, and an extension arm. In some embodiments, the PEgRNA comprises, from 5′ to 3′: a spacer, a gRNA core, an editing template, and a PBS. In some embodiments, the PEgRNA comprises, from 5′ to 3′: an extension arm, a spacer, and a gRNA core. In some embodiments, the PEgRNA comprises, from 5′ to 3′ an editing template, a PBS, a spacer, and a gRNA core.

[0224] In some embodiments, a PEgRNA comprises a single polynucleotide molecule that comprises the spacer sequence, the gRNA core, and the extension arm. In some embodiments, a PEgRNA comprises multiple polynucleotide molecules, for example, two polynucleotide molecules. In some embodiments, a PEgRNA comprise a first polynucleotide molecule that comprises the spacer and a portion of the gRNA core, and a second polynucleotide molecule that comprises the rest of the gRNA core and the extension arm. In some embodiments, the gRNA core portion in the first polynucleotide molecule and the gRNA core portion in the second polynucleotide molecule are at least partly complementary to each other. In some embodiments, the PEgRNA may comprise a first polynucleotide comprising the spacer and a first portion of a gRNA core comprising, which may be also be referred to as a crRNA. In some embodiments, the PEgRNA comprise a second polynucleotide comprising a second portion of the gRNA core and the extension arm, wherein the second portion of the gRNA core may also be referred to as a trans-activating crRNA, or tracr RNA. In some embodiments, the crRNA portion and the tracr RNA portion of the gRNA core are at least partially complementary to each other. In some embodiments, the partially complementary portions of the crRNA and the tracr RNA form a lower stem, a bulge, and an upper stem, as exemplified in FIG. 4.

[0225] In some embodiments, a spacer sequence comprises a region that has substantial complementarity to a search target sequence on the target strand of a double stranded target DNA, e.g., an ATP7B gene. In some embodiments, the spacer sequence of a PEgRNA is identical or substantially identical to a protospacer sequence on the edit strand of the target gene (except that the protospacer sequence comprises thymine and the spacer sequence may comprise uracil). In some embodiments, the spacer sequence is at least about 70%, 75%, 80%, 85%, 90%, 95%, or 100% complementary to a search target sequence in the target gene. In some embodiments, the spacer comprises is substantially complementary to the search target sequence.

[0226] In some embodiments, the length of the spacer varies from about 10 to about 100 nucleotides. In some embodiments, the spacer is 16 nucleotides, 17 nucleotides, 18 nucleotides, 19 nucleotides, 20 nucleotides, 21 nucleotides, 22 nucleotides, 23 nucleotides, 24 nucleotides, or 25 nucleotides in length. In some embodiments, the spacer is from 15 nucleotides to 30 nucleotides in length, 15 to 25 nucleotides in length, 18 to 22 nucleotides in length, 10 to 20 nucleotides in length, or 20 to 30 nucleotides in length. In some embodiments, the spacer is 16 to 22 nucleotides in length. In some embodiments, the spacer is 16 to 20 nucleotides in length. In some embodiments, the spacer is 17 to 18 nucleotides in length. In some embodiments, the spacer is 20 nucleotides in length.

[0227] As used herein in a PEgRNA or a nick guide RNA sequence, or fragments thereof such as a spacer, PBS, or RTT sequence, unless indicated otherwise, it should be appreciated that the letter “T” or “thymine” indicates a nucleobase in a DNA sequence that encodes the PEgRNA or guide RNA sequence, and is intended to refer to a uracil (U) nucleobase of the PEgRNA or guide RNA or any chemically modified uracil nucleobase known in the art, such as 5-methoxyuracil.

[0228] The extension arm of a PEgRNA may comprise a primer binding site (PBS) and an editing template (e.g., an RTT). The extension arm may be partially complementary to the spacer. In some embodiments, the editing template (e.g., RTT) is partially complementary to the spacer. In some embodiments, the editing template (e.g., RTT) and the primer binding site (PBS) are each partially complementary to the spacer.

[0229] An extension arm of a PEgRNA may comprise a primer binding site sequence (PBS, or PBS sequence) that comprises complementarity to and can hybridize with a free 3′ end of a single stranded DNA in the target gene (e.g. the ATP7B gene) generated by nicking with a prime editor at the nick site on the PAM strand. The length of the PBS sequence may vary depending on, e.g., the prime editor components, the search target sequence and other components of the PEgRNA. In some embodiments, the PBS is about 3 to 19 nucleotides in length. in some embodiments, the PBS is about 3 to 17 nucleotides in length. In some embodiments, the PBS is about 4 to 16 nucleotides, about 6 to 16 nucleotides, about 6 to 18 nucleotides, about 6 to 20 nucleotides, about 8 to 20 nucleotides, about 10 to 20 nucleotides, about 12 to 20 nucleotides, about 14 to 20 nucleotides, about 16 to 20 nucleotides, or about 18 to 20 nucleotides in length. In some embodiments, the PBS is 8 to 17 nucleotides in length. In some embodiments, the PBS is 8 to 16 nucleotides in length. In some embodiments, the PBS is 8 to 15 nucleotides in length. In some embodiments, the PBS is 8 to 14 nucleotides in length. In some embodiments, the PBS is 8 to 13 nucleotides in length. In some embodiments, the PBS is 8 to 12 nucleotides in length. In some embodiments, the PBS is 8 to 11 nucleotides in length. In some embodiments, the PBS is 8 to 10 nucleotides in length. In some embodiments, the PBS is 8 or 9 nucleotides in length. In some embodiments, the PBS is 16 or 17 nucleotides in length. In some embodiments, the PBS is 15 to 17 nucleotides in length. In some embodiments, the PBS is 14 to 17 nucleotides in length. In some embodiments, the PBS is 13 to 17 nucleotides in length. In some embodiments, the PBS is 12 to 17 nucleotides in length. In some embodiments, the PBS is 11 to 17 nucleotides in length. In some embodiments, the PBS is 10 to 17 nucleotides in length. In some embodiments, the PBS is 9 to 17 nucleotides in length. In some embodiments, the PBS is about 7 to 15 nucleotides in length. In some embodiments, the PBS is 6, 7, 8, 9, 10, 11, 12, 13, 14, 15, 16, 17, 18, or 19 nucleotides in length. In some embodiments, the PBS is 8, 9, 10, 11, 12, 13, or 14 nucleotides in length.

[0230] The PBS may be complementary or substantially complementary to a DNA sequence in the edit strand of the target gene. By annealing with the edit strand at a free hydroxy group, e.g. a free 3′ end generated by prime editor nicking, the PBS may initiate synthesis of a new single stranded DNA encoded by the editing template at the nick site. In some embodiments, the PBS is at least about 70%, 75%, 80%, 85%, 90%, 95%, or 100% complementary to a region of the edit strand of the target gene (e.g., the ATP7B gene). In some embodiments, the PBS is perfectly complementary, or 100% complementary, to a region of the edit strand of the target gene (e.g., the ATP7B gene).

[0231] An extension arm of a PEgRNA may comprise an editing template that serves as a DNA synthesis template for the DNA polymerase in a prime editor during prime editing.

[0232] The length of an editing template may vary depending on, e.g., the prime editor components, the search target sequence and other components of the PEgRNA. In some embodiments, the editing template serves as a DNA synthesis template for a reverse transcriptase, and the editing template is referred to as a reverse transcription editing template (RTT).

[0233] The editing template (e.g., RTT), in some embodiments, is 2, 3, 4, 5, 6, 7, 8, 9, 10, 11, 12, 13, 14, 15, 16, 17, 18, 19, 20, 21, 22, 23, 24, or 25 nucleotides in length. In some embodiments, the RTT is 12, 13, 14, 15, 16, 17, 18, 19, 20, 21, 22, 23, 24, or 25 nucleotides in length. In some embodiments, the RTT is 16, 17, 18, 19, 20, 21, 22, 23, 24, 25, 26, 27, 28, 29, 30, 31, 32, 33, 34, 35, 36, 37, 38, 39, or 40 nucleotides in length. In some embodiments, the RTT is 16, 17, 18, 19, 20, 21, 22, 23, 24, 25, 26, 27, 28, 29, 30, 31, 32, 33, 34, 35, 36, 37, 38, 39, 40, 41, 42, 43, 44, 45, 46, 47, 48, 49, 50, 51, 52, 53, 54, 55, 56, 57, 58, 59, 60, 61, 62, 63, 64, 65, 66, 67, 68, 69, 70, 71, 72, 73, 74, 75, 76, 77, 78, 79, or 80 nucleotides in length.

[0234] In some embodiments, the editing template (e.g., RTT) sequence is about 70%, 75%, 80%, 85%, 90%, 95%, or 99% complementary to the editing target sequence on the edit strand of the target gene. In some embodiments, the editing template sequence (e.g., RTT) is substantially complementary to the editing target sequence. In some embodiments, the editing template sequence (e.g., RTT) is complementary to the editing target sequence except at positions of the intended nucleotide edits to be incorporated in the target gene. In some embodiments, the editing template comprises a nucleotide sequence comprising about 85% to about 95% complementarity to an editing target sequence in the edit strand in the target gene (e.g., the ATP7B gene). In some embodiments, the editing template comprises about 86%, about 87%, about 88%, about 89%, about 90%, about 91%, about 92%, about 93%, about 94%, about 95%, about 96%, about 97%, about 98%, or about 99% complementarity to an editing target sequence in the edit strand of the target gene (e.g., the ATP7B gene).

[0235] An intended nucleotide edit in an editing template of a PEgRNA may comprise various types of alterations as compared to the target gene sequence. In some embodiments, the nucleotide edit is a single nucleotide substitution as compared to the target gene sequence. In some embodiments, the nucleotide edit is a deletion as compared to the target gene sequence. In some embodiments, the nucleotide edit is an insertion as compared to the target gene sequence. In some embodiments, the editing template comprises one to ten intended nucleotide edits as compared to the target gene sequence. In some embodiments, the editing template comprises one or more intended nucleotide edits as compared to the target gene sequence. In some embodiments, the editing template comprises two or more intended nucleotide edits as compared to the target gene sequence. In some embodiments, the editing template comprises three or more intended nucleotide edits as compared to the target gene sequence. In some embodiments, the editing template comprises four or more, five or more, or six or more intended nucleotide edits as compared to the target gene sequence. In some embodiments, the editing template comprises two single nucleotide substitutions, insertions, deletions, or any combination thereof, as compared to the target gene sequence. In some embodiments, the editing template comprises three single nucleotide substitutions, insertions, deletions, or any combination thereof, as compared to the target gene sequence. In some embodiments, the editing template comprises four, five, or six single nucleotide substitutions, insertions, deletions, or any combination thereof, as compared to the target gene sequence. In some embodiments, a nucleotide substitution comprises an adenine (A)-to-thymine (T) substitution. In some embodiments, a nucleotide substitution comprises an A-to-guanine (G) substitution. In some embodiments, a nucleotide substitution comprises an A-to-cytosine (C) substitution. In some embodiments, a nucleotide substitution comprises a T-A substitution. In some embodiments, a nucleotide substitution comprises a T-G substitution. In some embodiments, a nucleotide substitution comprises a T-C substitution. In some embodiments, a nucleotide substitution comprises a G-to-A substitution. In some embodiments, a nucleotide substitution comprises a G-to-T substitution. In some embodiments, a nucleotide substitution comprises a G-to-C substitution. In some embodiments, a nucleotide substitution comprises a C-to-A substitution. In some embodiments, a nucleotide substitution comprises a C-to-T substitution. In some embodiments, a nucleotide substitution comprises a C-to-G substitution.

[0236] In some embodiments, a nucleotide insertion is at least 5 nucleotides, at least 6 nucleotides, at least 7 nucleotides, at least 8 nucleotides, at least 9 nucleotides, at least 10 nucleotides, at least 11 nucleotides, at least 12 nucleotides, at least 13 nucleotides, at least 14 nucleotides, at least 15 nucleotides, at least 16 nucleotides, at least 17 nucleotides, at least 18 nucleotides, at least 19 nucleotides, or at least 20 nucleotides in length. In some embodiments, a nucleotide insertion is from 1 to 2 nucleotides, from 1 to 3 nucleotides, from 1 to 4 nucleotides, from 1 to 5 nucleotides, form 2 to 5 nucleotides, from 3 to 5 nucleotides, from 3 to 6 nucleotides, from 3 to 8 nucleotides, from 4 to 9 nucleotides, from 5 to 10 nucleotides, from 6 to 11 nucleotides, from 7 to 12 nucleotides, from 8 to 13 nucleotides, from 9 to 14 nucleotides, from 10 to 15 nucleotides, from 11 to 16 nucleotides, from 12 to 17 nucleotides, from 13 to 18 nucleotides, from 14 to 19 nucleotides, from 15 to 20 nucleotides in length. In some embodiments, a nucleotide insertion is a single nucleotide insertion. In some embodiments, a nucleotide insertion comprises insertion of two nucleotides.

[0237] The editing template of a PEgRNA may comprise one or more intended nucleotide edits, compared to the ATP7B gene to be edited. Position of the intended nucleotide edit(s) relevant to other components of the PEgRNA, or to particular nucleotides (e.g., mutations) in the ATP7B target gene may vary. In some embodiments, the nucleotide edit is in a region of the PEgRNA corresponding to or homologous to the protospacer sequence. In some embodiments, the nucleotide edit is in a region of the PEgRNA corresponding to a region of the ATP7B gene outside of the protospacer sequence.

[0238] In some embodiments, the position of a nucleotide edit incorporation in the target gene may be determined based on position of the protospacer adjacent motif (PAM). For instance, the intended nucleotide edit may be installed in a sequence corresponding to the protospacer adjacent motif (PAM) sequence. In some embodiments, a nucleotide edit in the editing template is at a position corresponding to the 5′ most nucleotide of the PAM sequence. In some embodiments, a nucleotide edit in the editing template is at a position corresponding to the 3′ most nucleotide of the PAM sequence. In some embodiments, position of an intended nucleotide edit in the editing template may be referred to by aligning the editing template with the partially complementary edit strand of the target gene, and referring to nucleotide positions on the editing strand where the intended nucleotide edit is incorporated. In some embodiments, a nucleotide edit is incorporated at a position corresponding to about 0, 1, 2, 3, 4, 5, 6, 7, 8, 9, 10, 11, 12, 13, 14, 15, 16, 17, 18, 19, 20, 21, 22, 23, 24, 25, 26, 27, 28, 29, 30, 31, 32, 33, 34, 35, 36, 37, 38, 39, or 40 nucleotides upstream of the 5′ most nucleotide of the PAM sequence in the edit strand of the target gene. By 0 base pair upstream or downstream of a reference position, it is meant that the intended nucleotide is immediately upstream or downstream of the reference position. In some embodiments, a nucleotide edit is incorporated at a position corresponding to about 0 to 2 nucleotides, 0 to 4 nucleotides, 0 to 6 nucleotides, 0 to 8 nucleotides, 0 to 10 nucleotides, 2 to 4 nucleotides, 2 to 6 nucleotides, 2 to 8 nucleotides, 2 to 10 nucleotides, 2 to 12 nucleotides, 4 to 6 nucleotides, 4 to 8 nucleotides, 4 to 10 nucleotides, 4 to 12 nucleotides, 4 to 14 nucleotides, 6 to 8 nucleotides, 6 to 10 nucleotides, 6 to 12 nucleotides, 6 to 14 nucleotides, 6 to 16 nucleotides, 8 to 10 nucleotides, 8 to 12 nucleotides, 8 to 14 nucleotides, 8 to 16 nucleotides, 8 to 18 nucleotides, 10 to 12 nucleotides, 10 to 14 nucleotides, 10 to 16 nucleotides, 10 to 18 nucleotides, 10 to 20 nucleotides, 12 to 14 nucleotides, 12 to 16 nucleotides, 12 to 18 nucleotides, 12 to 20 nucleotides, 12 to 22 nucleotides, 14 to 16 nucleotides, 14 to 18 nucleotides, 14 to 20 nucleotides, 14 to 22 nucleotides, 14 to 24 nucleotides, 16 to 18 nucleotides, 16 to 20 nucleotides, 16 to 22 nucleotides, 16 to 24 nucleotides, 16 to 26 nucleotides, 18 to 20 nucleotides, 18 to 22 nucleotides, 18 to 24 nucleotides, 18 to 26 nucleotides, 18 to 28 nucleotides, 20 to 22 nucleotides, 20 to 24 nucleotides, 20 to 26 nucleotides, 20 to 28 nucleotides, or 20 to 30 nucleotides upstream of the 5′ most nucleotide of the PAM sequence. In some embodiments, the nucleotide edit is incorporated at a position corresponding to 3 nucleotides upstream of the 5′ most nucleotide of the PAM sequence. In some embodiments, the nucleotide edit in is incorporated at a position corresponding to 4 nucleotides upstream of the 5′ most nucleotide of the PAM sequence. In some embodiments, the nucleotide edit is incorporated at a position corresponding to 5 nucleotides upstream of the 5′ most nucleotide of the PAM sequence. In some embodiments, the nucleotide edit in the editing template is at a position corresponding to 6 nucleotides upstream of the 5′ most nucleotide of the PAM sequence.

[0239] In some embodiments, an intended nucleotide edit is incorporated at a position corresponding to about 0, 1, 2, 3, 4, 5, 6, 7, 8, 9, 10, 11, 12, 13, 14, 15, 16, 17, 18, 19, 20, 21, 22, 23, 24, 25, 26, 27, 28, 29, 30, 31, 32, 33, 34, 35, 36, 37, 38, 39, or 40 nucleotides downstream of the 5′ most nucleotide of the PAM sequence in the edit strand of the target gene. In some embodiments, a nucleotide edit is incorporated at a position corresponding to about 0 to 2 nucleotides, 0 to 4 nucleotides, 0 to 6 nucleotides, 0 to 8 nucleotides, 0 to 10 nucleotides, 2 to 4 nucleotides, 2 to 6 nucleotides, 2 to 8 nucleotides, 2 to 10 nucleotides, 2 to 12 nucleotides, 4 to 6 nucleotides, 4 to 8 nucleotides, 4 to 10 nucleotides, 4 to 12 nucleotides, 4 to 14 nucleotides, 6 to 8 nucleotides, 6 to 10 nucleotides, 6 to 12 nucleotides, 6 to 14 nucleotides, 6 to 16 nucleotides, 8 to 10 nucleotides, 8 to 12 nucleotides, 8 to 14 nucleotides, 8 to 16 nucleotides, 8 to 18 nucleotides, 10 to 12 nucleotides, 10 to 14 nucleotides, 10 to 16 nucleotides, 10 to 18 nucleotides, 10 to 20 nucleotides, 12 to 14 nucleotides, 12 to 16 nucleotides, 12 to 18 nucleotides, 12 to 20 nucleotides, 12 to 22 nucleotides, 14 to 16 nucleotides, 14 to 18 nucleotides, 14 to 20 nucleotides, 14 to 22 nucleotides, 14 to 24 nucleotides, 16 to 18 nucleotides, 16 to 20 nucleotides, 16 to 22 nucleotides, 16 to 24 nucleotides, 16 to 26 nucleotides, 18 to 20 nucleotides, 18 to 22 nucleotides, 18 to 24 nucleotides, 18 to 26 nucleotides, 18 to 28 nucleotides, 20 to 22 nucleotides, 20 to 24 nucleotides, 20 to 26 nucleotides, 20 to 28 nucleotides, or 20 to 30 nucleotides downstream of the 5′ most nucleotide of the PAM sequence. In some embodiments, a nucleotide edit is incorporated at a position corresponding to 3 nucleotides downstream of the 5′ most nucleotide of the PAM sequence. In some embodiments, a nucleotide edit is incorporated at a position corresponding to 4 nucleotides downstream of the 5′ most nucleotide of the PAM sequence. In some embodiments, a nucleotide edit is incorporated at a position corresponding to 5 nucleotides downstream of the 5′ most nucleotide of the PAM sequence. In some embodiments, a nucleotide edit is incorporated at a position corresponding to 6 nucleotides downstream of the 5′ most nucleotide of the PAM sequence. By “upstream” and “downstream” it is intended to define relevant positions at least two regions or sequences in a nucleic acid molecule orientated in a 5′-to-3′ direction. For example, a first sequence is upstream of a second sequence in a DNA molecule where the first sequence is positioned 5′ to the second sequence. Accordingly, the second sequence is downstream of the first sequence.

[0240] When referred to within the PEgRNA, positions of the one or more intended nucleotide edits may be referred to relevant to components of the PEgRNA. For example, an intended nucleotide edit may be 5′ or 3′ to the PBS. In some embodiments, a PEgRNA comprises the structure, from 5′ to 3′: a spacer, a gRNA core, an editing template, and a PBS. In some embodiments, the intended nucleotide edit is 0, 1, 2, 3, 4, 5, 6, 7, 8, 9, 10, 11, 12, 13, 14, 15, 16, 17, 18, 19, 20, 21, 22, 23, 24, 25, 26, 27, 28, 29, 30, 31, 32, 33, 34, 35, 36, 37, 38, 39, or 40 nucleotides upstream to the 5′ most nucleotide of the PBS. In some embodiments, the intended nucleotide edit is 0 to 2 nucleotides, 0 to 4 nucleotides, 0 to 6 nucleotides, 0 to 8 nucleotides, 0 to 10 nucleotides, 2 to 4 nucleotides, 2 to 6 nucleotides, 2 to 8 nucleotides, 2 to 10 nucleotides, 2 to 12 nucleotides, 4 to 6 nucleotides, 4 to 8 nucleotides, 4 to 10 nucleotides, 4 to 12 nucleotides, 4 to 14 nucleotides, 6 to 8 nucleotides, 6 to 10 nucleotides, 6 to 12 nucleotides, 6 to 14 nucleotides, 6 to 16 nucleotides, 8 to 10 nucleotides, 8 to 12 nucleotides, 8 to 14 nucleotides, 8 to 16 nucleotides, 8 to 18 nucleotides, 10 to 12 nucleotides, 10 to 14 nucleotides, 10 to 16 nucleotides, 10 to 18 nucleotides, 10 to 20 nucleotides, 12 to 14 nucleotides, 12 to 16 nucleotides, 12 to 18 nucleotides, 12 to 20 nucleotides, 12 to 22 nucleotides, 14 to 16 nucleotides, 14 to 18 nucleotides, 14 to 20 nucleotides, 14 to 22 nucleotides, 14 to 24 nucleotides, 16 to 18 nucleotides, 16 to 20 nucleotides, 16 to 22 nucleotides, 16 to 24 nucleotides, 16 to 26 nucleotides, 18 to 20 nucleotides, 18 to 22 nucleotides, 18 to 24 nucleotides, 18 to 26 nucleotides, 18 to 28 nucleotides, 20 to 22 nucleotides, 20 to 24 nucleotides, 20 to 26 nucleotides, 20 to 28 nucleotides, or 20 to 30 nucleotides upstream to the 5′ most nucleotide of the PBS.

[0241] The corresponding positions of the intended nucleotide edit incorporated in the target gene may also be referred to based on the nicking position (i.e. the nick site) generated by a prime editor based on sequence homology and complementarity. For example, in embodiments, the distance between the intended nucleotide edit to be incorporated into the target ATP7B gene and the nick site (also referred to as the “nick to edit distance”) may be determined by the position of the nick site and the position of the nucleotide(s) corresponding to the intended nucleotide edit(s), for example, by identifying sequence complementarity between the spacer and the search target sequence and sequence complementarity between the editing template and the editing target sequence. In certain embodiments, the position of the nucleotide edit can be in any position downstream of the nick site on the edit strand (or the PAM strand) generated by the prime editor, such that the distance between the nick site and the intended nucleotide edit is 0, 1, 2, 3, 4, 5, 6, 7, 8, 9, 10, 11, 12, 13, 14, 15, 16, 17, 18, 19, 20, 21, 22, 23, 24, 25, 26, 27, 28, 29, or 30 nucleotides in length. In some embodiments, the position of the nucleotide edit is 0, 1, 2, 3, 4, 5, 6, 7, 8, 9, 10, 11, 12, 13, 14, 15, 16, 17, 18, 19, 20, 21, 22, 23, 24, 25, 26, 27, 28, 29, or 30 nucleotides upstream of the nick site on the edit strand. In some embodiments, the position of the nucleotide edit is 0, 1, 2, 3, 4, 5, 6, 7, 8, 9, 10, 11, 12, 13, 14, 15, 16, 17, 18, 19, 20, 21, 22, 23, 24, 25, 26, 27, 28, 29, or 30 nucleotides downstream of the nick site on the edit strand. In some embodiments, the position of the nucleotide edit is 0 base pair from the nick site on the edit strand, that is, the editing position is at the same position as the nick site. As used herein, the distance between the nick site and the nucleotide edit, for example, where the nucleotide edit comprises an insertion or deletion, refers to the 5′ most position of the nucleotide edit for a nick that creates a 3′ free end on the edit strand (i.e., the “near position” of the nucleotide edit to the nick site). Similarly, as used herein, the distance between the nick site and a PAM position edit, for example, where the nucleotide edit comprises an insertion, deletion, or substitution of two or more contiguous nucleotides, refers to the 5′ most position of the nucleotide edit and the 5′ most position of the PAM sequence.

[0242] In some embodiments, the editing template extends beyond a nucleotide edit to be incorporated to the target ATP7B gene sequence. For example, in some embodiments, the editing template comprises at least 1, 2, 3, 4, 5, 6, 7, 8, 9, 10, 11, 12, 13, 14, 15, 16, 17, 18, 19, 20, 21, 22, 23, 24, 25, 26, 27, 28, 29, 30, 31, 32, 33, 34, 35, 36, 37, 38, 39, 40, 41, 42, 43, 44, 45, 46, 47, 48, 49, 50, 51, 52, 53, 54, 55, 56, 57, 58, 59, 60, 61, 62, 63, 64, 65, 66, 67, 68, 69, 70, 71, 72, 73, 74, 75, 76, 77, 78, 79, or 80 nucleotides 3′ to the nucleotide edit to be incorporated to the target ATP7B gene sequence. In some embodiments, the editing template comprises 1 to 80 nucleotides 3′ to the nucleotide edit to be incorporated to the target ATP7B gene sequence.

[0243] In some embodiments, the editing template comprises 1 to 2 nucleotides 3′ to the nucleotide edit to be incorporated to the target ATP7B gene sequence. In some embodiments, the editing template comprises 1 to 3 nucleotides 3′ to the nucleotide edit to be incorporated to the target ATP7B gene sequence. In some embodiments, the editing template comprises 1 to 4 nucleotides 3′ to the nucleotide edit to be incorporated to the target ATP7B gene sequence. In some embodiments, the editing template comprises 1 to 5 nucleotides 3′ to the nucleotide edit to be incorporated to the target ATP7B gene sequence. In some embodiments, the editing template comprises 1 to 6 nucleotides 3′ to the nucleotide edit to be incorporated to the target ATP7B gene sequence. In some embodiments, the editing template comprises 1 to 7 nucleotides 3′ to the nucleotide edit to be incorporated to the target ATP7B gene sequence. In some embodiments, the editing template comprises 1 to 8 nucleotides 3′ to the nucleotide edit to be incorporated to the target ATP7B gene sequence. In some embodiments, the editing template comprises 1 to 9 nucleotides 3′ to the nucleotide edit to be incorporated to the target ATP7B gene sequence. In some embodiments, the editing template comprises 1 to 10 nucleotides 3′ to the nucleotide edit to be incorporated to the target ATP7B gene sequence. In some embodiments, the editing template comprises 1 to 11 nucleotides 3′ to the nucleotide edit to be incorporated to the target ATP7B gene sequence. In some embodiments, the editing template comprises 1 to 12 nucleotides 3′ to the nucleotide edit to be incorporated to the target ATP7B gene sequence. In some embodiments, the editing template comprises 1 to 13 nucleotides 3′ to the nucleotide edit to be incorporated to the target ATP7B gene sequence. In some embodiments, the editing template comprises 1 to 14 nucleotides 3′ to the nucleotide edit to be incorporated to the target ATP7B gene sequence. In some embodiments, the editing template comprises 1 to 15 nucleotides 3′ to the nucleotide edit to be incorporated to the target ATP7B gene sequence. In some embodiments, the editing template comprises 1 to 16 nucleotides 3′ to the nucleotide edit to be incorporated to the target ATP7B gene sequence. In some embodiments, the editing template comprises 1 to 17 nucleotides 3′ to the nucleotide edit to be incorporated to the target ATP7B gene sequence. In some embodiments, the editing template comprises 1 to 18 nucleotides 3′ to the nucleotide edit to be incorporated to the target ATP7B gene sequence. In some embodiments, the editing template comprises 1 to 19 nucleotides 3′ to the nucleotide edit to be incorporated to the target ATP7B gene sequence. In some embodiments, the editing template comprises 1 to 20 nucleotides 3′ to the nucleotide edit to be incorporated to the target ATP7B gene sequence. In some embodiments, the editing template comprises 1 to 21 nucleotides 3′ to the nucleotide edit to be incorporated to the target ATP7B gene sequence. In some embodiments, the editing template comprises 1 to 22 nucleotides 3′ to the nucleotide edit to be incorporated to the target ATP7B gene sequence. In some embodiments, the editing template comprises 1 to 23 nucleotides 3′ to the nucleotide edit to be incorporated to the target ATP7B gene sequence. In some embodiments, the editing template comprises 1 to 24 nucleotides 3′ to the nucleotide edit to be incorporated to the target ATP7B gene sequence. In some embodiments, the editing template comprises 1 to 25 nucleotides 3′ to the nucleotide edit to be incorporated to the target ATP7B gene sequence. In some embodiments, the editing template comprises 1 to 26 nucleotides 3′ to the nucleotide edit to be incorporated to the target ATP7B gene sequence. In some embodiments, the editing template comprises 1 to 27 nucleotides 3′ to the nucleotide edit to be incorporated to the target ATP7B gene sequence. In some embodiments, the editing template comprises 1 to 28 nucleotides 3′ to the nucleotide edit to be incorporated to the target ATP7B gene sequence. In some embodiments, the editing template comprises 1 to 29 nucleotides 3′ to the nucleotide edit to be incorporated to the target ATP7B gene sequence. In some embodiments, the editing template comprises 1 to 30 nucleotides 3′ to the nucleotide edit to be incorporated to the target ATP7B gene sequence. In some embodiments, the editing template comprises 1 to 31 nucleotides 3′ to the nucleotide edit to be incorporated to the target ATP7B gene sequence. In some embodiments, the editing template comprises 1 to 32 nucleotides 3′ to the nucleotide edit to be incorporated to the target ATP7B gene sequence. In some embodiments, the editing template comprises 1 to 33 nucleotides 3′ to the nucleotide edit to be incorporated to the target ATP7B gene sequence. In some embodiments, the editing template comprises 1 to 34 nucleotides 3′ to the nucleotide edit to be incorporated to the target ATP7B gene sequence. In some embodiments, the editing template comprises 1 to 35 nucleotides 3′ to the nucleotide edit to be incorporated to the target ATP7B gene sequence. In some embodiments, the editing template comprises 1 to 36 nucleotides 3′ to the nucleotide edit to be incorporated to the target ATP7B gene sequence. In some embodiments, the editing template comprises 1 to 37 nucleotides 3′ to the nucleotide edit to be incorporated to the target ATP7B gene sequence. In some embodiments, the editing template comprises 1 to 38 nucleotides 3′ to the nucleotide edit to be incorporated to the target ATP7B gene sequence. In some embodiments, the editing template comprises 1 to 39 nucleotides 3′ to the nucleotide edit to be incorporated to the target ATP7B gene sequence. In some embodiments, the editing template comprises 1 to 40 nucleotides 3′ to the nucleotide edit to be incorporated to the target ATP7B gene sequence. In some embodiments, the editing template comprises 1 to 41 nucleotides 3′ to the nucleotide edit to be incorporated to the target ATP7B gene sequence. In some embodiments, the editing template comprises 1 to 42 nucleotides 3′ to the nucleotide edit to be incorporated to the target ATP7B gene sequence. In some embodiments, the editing template comprises 1 to 43 nucleotides 3′ to the nucleotide edit to be incorporated to the target ATP7B gene sequence. In some embodiments, the editing template comprises 1 to 44 nucleotides 3′ to the nucleotide edit to be incorporated to the target ATP7B gene sequence. In some embodiments, the editing template comprises 1 to 45 nucleotides 3′ to the nucleotide edit to be incorporated to the target ATP7B gene sequence. In some embodiments, the editing template comprises 1 to 46 nucleotides 3′ to the nucleotide edit to be incorporated to the target ATP7B gene sequence. In some embodiments, the editing template comprises 1 to 47 nucleotides 3′ to the nucleotide edit to be incorporated to the target ATP7B gene sequence. In some embodiments, the editing template comprises 1 to 48 nucleotides 3′ to the nucleotide edit to be incorporated to the target ATP7B gene sequence. In some embodiments, the editing template comprises 1 to 49 nucleotides 3′ to the nucleotide edit to be incorporated to the target ATP7B gene sequence. In some embodiments, the editing template comprises 1 to 50 nucleotides 3′ to the nucleotide edit to be incorporated to the target ATP7B gene sequence. In some embodiments, the editing template comprises 1 to 51 nucleotides 3′ to the nucleotide edit to be incorporated to the target ATP7B gene sequence. In some embodiments, the editing template comprises 1 to 52 nucleotides 3′ to the nucleotide edit to be incorporated to the target ATP7B gene sequence. In some embodiments, the editing template comprises 1 to 53 nucleotides 3′ to the nucleotide edit to be incorporated to the target ATP7B gene sequence. In some embodiments, the editing template comprises 1 to 54 nucleotides 3′ to the nucleotide edit to be incorporated to the target ATP7B gene sequence. In some embodiments, the editing template comprises 1 to 55 nucleotides 3′ to the nucleotide edit to be incorporated to the target ATP7B gene sequence. In some embodiments, the editing template comprises 1 to 56 nucleotides 3′ to the nucleotide edit to be incorporated to the target ATP7B gene sequence. In some embodiments, the editing template comprises 1 to 57 nucleotides 3′ to the nucleotide edit to be incorporated to the target ATP7B gene sequence. In some embodiments, the editing template comprises 1 to 58 nucleotides 3′ to the nucleotide edit to be incorporated to the target ATP7B gene sequence. In some embodiments, the editing template comprises 1 to 59 nucleotides 3′ to the nucleotide edit to be incorporated to the target ATP7B gene sequence. In some embodiments, the editing template comprises 1 to 60 nucleotides 3′ to the nucleotide edit to be incorporated to the target ATP7B gene sequence. In some embodiments, the editing template comprises 1 to 61 nucleotides 3′ to the nucleotide edit to be incorporated to the target ATP7B gene sequence. In some embodiments, the editing template comprises 1 to 62 nucleotides 3′ to the nucleotide edit to be incorporated to the target ATP7B gene sequence. In some embodiments, the editing template comprises 1 to 63 nucleotides 3′ to the nucleotide edit to be incorporated to the target ATP7B gene sequence. In some embodiments, the editing template comprises 1 to 64 nucleotides 3′ to the nucleotide edit to be incorporated to the target ATP7B gene sequence. In some embodiments, the editing template comprises 1 to 65 nucleotides 3′ to the nucleotide edit to be incorporated to the target ATP7B gene sequence. In some embodiments, the editing template comprises 1 to 66 nucleotides 3′ to the nucleotide edit to be incorporated to the target ATP7B gene sequence. In some embodiments, the editing template comprises 1 to 67 nucleotides 3′ to the nucleotide edit to be incorporated to the target ATP7B gene sequence. In some embodiments, the editing template comprises 1 to 68 nucleotides 3′ to the nucleotide edit to be incorporated to the target ATP7B gene sequence. In some embodiments, the editing template comprises 1 to 69 nucleotides 3′ to the nucleotide edit to be incorporated to the target ATP7B gene sequence. In some embodiments, the editing template comprises 1 to 70 nucleotides 3′ to the nucleotide edit to be incorporated to the target ATP7B gene sequence. In some embodiments, the editing template comprises 1 to 71 nucleotides 3′ to the nucleotide edit to be incorporated to the target ATP7B gene sequence. In some embodiments, the editing template comprises 1 to 72 nucleotides 3′ to the nucleotide edit to be incorporated to the target ATP7B gene sequence. In some embodiments, the editing template comprises 1 to 73 nucleotides 3′ to the nucleotide edit to be incorporated to the target ATP7B gene sequence. In some embodiments, the editing template comprises 1 to 74 nucleotides 3′ to the nucleotide edit to be incorporated to the target ATP7B gene sequence. In some embodiments, the editing template comprises 1 to 75 nucleotides 3′ to the nucleotide edit to be incorporated to the target ATP7B gene sequence. In some embodiments, the editing template comprises 1 to 76 nucleotides 3′ to the nucleotide edit to be incorporated to the target ATP7B gene sequence. In some embodiments, the editing template comprises 1 to 77 nucleotides 3′ to the nucleotide edit to be incorporated to the target ATP7B gene sequence. In some embodiments, the editing template comprises 1 to 78 nucleotides 3′ to the nucleotide edit to be incorporated to the target ATP7B gene sequence. In some embodiments, the editing template comprises 2 to 80 nucleotides 3′ to the nucleotide edit to be incorporated to the target ATP7B gene sequence. In some embodiments, the editing template comprises 3 to 80 nucleotides 3′ to the nucleotide edit to be incorporated to the target ATP7B gene sequence. In some embodiments, the editing template comprises 4 to 80 nucleotides 3′ to the nucleotide edit to be incorporated to the target ATP7B gene sequence. In some embodiments, the editing template comprises 5 to 80 nucleotides 3′ to the nucleotide edit to be incorporated to the target ATP7B gene sequence. In some embodiments, the editing template comprises 6 to 80 nucleotides 3′ to the nucleotide edit to be incorporated to the target ATP7B gene sequence. In some embodiments, the editing template comprises 7 to 80 nucleotides 3′ to the nucleotide edit to be incorporated to the target ATP7B gene sequence. In some embodiments, the editing template comprises 8 to 80 nucleotides 3′ to the nucleotide edit to be incorporated to the target ATP7B gene sequence. In some embodiments, the editing template comprises 9 to 80 nucleotides 3′ to the nucleotide edit to be incorporated to the target ATP7B gene sequence. In some embodiments, the editing template comprises 10 to 80 nucleotides 3′ to the nucleotide edit to be incorporated to the target ATP7B gene sequence. In some embodiments, the editing template comprises 11 to 80 nucleotides 3′ to the nucleotide edit to be incorporated to the target ATP7B gene sequence. In some embodiments, the editing template comprises 12 to 80 nucleotides 3′ to the nucleotide edit to be incorporated to the target ATP7B gene sequence. In some embodiments, the editing template comprises 13 to 80 nucleotides 3′ to the nucleotide edit to be incorporated to the target ATP7B gene sequence. In some embodiments, the editing template comprises 14 to 80 nucleotides 3′ to the nucleotide edit to be incorporated to the target ATP7B gene sequence. In some embodiments, the editing template comprises 15 to 80 nucleotides 3′ to the nucleotide edit to be incorporated to the target ATP7B gene sequence. In some embodiments, the editing template comprises 16 to 80 nucleotides 3′ to the nucleotide edit to be incorporated to the target ATP7B gene sequence. In some embodiments, the editing template comprises 17 to 80 nucleotides 3′ to the nucleotide edit to be incorporated to the target ATP7B gene sequence. In some embodiments, the editing template comprises 18 to 80 nucleotides 3′ to the nucleotide edit to be incorporated to the target ATP7B gene sequence. In some embodiments, the editing template comprises 19 to 80 nucleotides 3′ to the nucleotide edit to be incorporated to the target ATP7B gene sequence. In some embodiments, the editing template comprises 20 to 80 nucleotides 3′ to the nucleotide edit to be incorporated to the target ATP7B gene sequence. In some embodiments, the editing template comprises 21 to 80 nucleotides 3′ to the nucleotide edit to be incorporated to the target ATP7B gene sequence. In some embodiments, the editing template comprises 22 to 80 nucleotides 3′ to the nucleotide edit to be incorporated to the target ATP7B gene sequence. In some embodiments, the editing template comprises 23 to 80 nucleotides 3′ to the nucleotide edit to be incorporated to the target ATP7B gene sequence. In some embodiments, the editing template comprises 24 to 80 nucleotides 3′ to the nucleotide edit to be incorporated to the target ATP7B gene sequence. In some embodiments, the editing template comprises 25 to 80 nucleotides 3′ to the nucleotide edit to be incorporated to the target ATP7B gene sequence. In some embodiments, the editing template comprises 26 to 80 nucleotides 3′ to the nucleotide edit to be incorporated to the target ATP7B gene sequence. In some embodiments, the editing template comprises 27 to 80 nucleotides 3′ to the nucleotide edit to be incorporated to the target ATP7B gene sequence. In some embodiments, the editing template comprises 28 to 80 nucleotides 3′ to the nucleotide edit to be incorporated to the target ATP7B gene sequence. In some embodiments, the editing template comprises 29 to 80 nucleotides 3′ to the nucleotide edit to be incorporated to the target ATP7B gene sequence. In some embodiments, the editing template comprises 30 to 80 nucleotides 3′ to the nucleotide edit to be incorporated to the target ATP7B gene sequence. In some embodiments, the editing template comprises 31 to 80 nucleotides 3′ to the nucleotide edit to be incorporated to the target ATP7B gene sequence. In some embodiments, the editing template comprises 32 to 80 nucleotides 3′ to the nucleotide edit to be incorporated to the target ATP7B gene sequence. In some embodiments, the editing template comprises 33 to 80 nucleotides 3′ to the nucleotide edit to be incorporated to the target ATP7B gene sequence. In some embodiments, the editing template comprises 34 to 80 nucleotides 3′ to the nucleotide edit to be incorporated to the target ATP7B gene sequence. In some embodiments, the editing template comprises 35 to 80 nucleotides 3′ to the nucleotide edit to be incorporated to the target ATP7B gene sequence. In some embodiments, the editing template comprises 36 to 80 nucleotides 3′ to the nucleotide edit to be incorporated to the target ATP7B gene sequence. In some embodiments, the editing template comprises 37 to 80 nucleotides 3′ to the nucleotide edit to be incorporated to the target ATP7B gene sequence. In some embodiments, the editing template comprises 38 to 80 nucleotides 3′ to the nucleotide edit to be incorporated to the target ATP7B gene sequence. In some embodiments, the editing template comprises 39 to 80 nucleotides 3′ to the nucleotide edit to be incorporated to the target ATP7B gene sequence. In some embodiments, the editing template comprises 40 to 80 nucleotides 3′ to the nucleotide edit to be incorporated to the target ATP7B gene sequence. In some embodiments, the editing template comprises 41 to 80 nucleotides 3′ to the nucleotide edit to be incorporated to the target ATP7B gene sequence. In some embodiments, the editing template comprises 42 to 80 nucleotides 3′ to the nucleotide edit to be incorporated to the target ATP7B gene sequence. In some embodiments, the editing template comprises 43 to 80 nucleotides 3′ to the nucleotide edit to be incorporated to the target ATP7B gene sequence. In some embodiments, the editing template comprises 44 to 80 nucleotides 3′ to the nucleotide edit to be incorporated to the target ATP7B gene sequence. In some embodiments, the editing template comprises 45 to 80 nucleotides 3′ to the nucleotide edit to be incorporated to the target ATP7B gene sequence. In some embodiments, the editing template comprises 46 to 80 nucleotides 3′ to the nucleotide edit to be incorporated to the target ATP7B gene sequence. In some embodiments, the editing template comprises 47 to 80 nucleotides 3′ to the nucleotide edit to be incorporated to the target ATP7B gene sequence. In some embodiments, the editing template comprises 48 to 80 nucleotides 3′ to the nucleotide edit to be incorporated to the target ATP7B gene sequence. In some embodiments, the editing template comprises 49 to 80 nucleotides 3′ to the nucleotide edit to be incorporated to the target ATP7B gene sequence. In some embodiments, the editing template comprises 50 to 80 nucleotides 3′ to the nucleotide edit to be incorporated to the target ATP7B gene sequence. In some embodiments, the editing template comprises 51 to 80 nucleotides 3′ to the nucleotide edit to be incorporated to the target ATP7B gene sequence. In some embodiments, the editing template comprises 52 to 80 nucleotides 3′ to the nucleotide edit to be incorporated to the target ATP7B gene sequence. In some embodiments, the editing template comprises 53 to 80 nucleotides 3′ to the nucleotide edit to be incorporated to the target ATP7B gene sequence. In some embodiments, the editing template comprises 54 to 80 nucleotides 3′ to the nucleotide edit to be incorporated to the target ATP7B gene sequence. In some embodiments, the editing template comprises 55 to 80 nucleotides 3′ to the nucleotide edit to be incorporated to the target ATP7B gene sequence. In some embodiments, the editing template comprises 56 to 80 nucleotides 3′ to the nucleotide edit to be incorporated to the target ATP7B gene sequence. In some embodiments, the editing template comprises 57 to 80 nucleotides 3′ to the nucleotide edit to be incorporated to the target ATP7B gene sequence. In some embodiments, the editing template comprises 58 to 80 nucleotides 3′ to the nucleotide edit to be incorporated to the target ATP7B gene sequence. In some embodiments, the editing template comprises 59 to 80 nucleotides 3′ to the nucleotide edit to be incorporated to the target ATP7B gene sequence. In some embodiments, the editing template comprises 60 to 80 nucleotides 3′ to the nucleotide edit to be incorporated to the target ATP7B gene sequence. In some embodiments, the editing template comprises 61 to 80 nucleotides 3′ to the nucleotide edit to be incorporated to the target ATP7B gene sequence. In some embodiments, the editing template comprises 62 to 80 nucleotides 3′ to the nucleotide edit to be incorporated to the target ATP7B gene sequence. In some embodiments, the editing template comprises 63 to 80 nucleotides 3′ to the nucleotide edit to be incorporated to the target ATP7B gene sequence. In some embodiments, the editing template comprises 64 to 80 nucleotides 3′ to the nucleotide edit to be incorporated to the target ATP7B gene sequence. In some embodiments, the editing template comprises 65 to 80 nucleotides 3′ to the nucleotide edit to be incorporated to the target ATP7B gene sequence. In some embodiments, the editing template comprises 66 to 80 nucleotides 3′ to the nucleotide edit to be incorporated to the target ATP7B gene sequence. In some embodiments, the editing template comprises 67 to 80 nucleotides 3′ to the nucleotide edit to be incorporated to the target ATP7B gene sequence. In some embodiments, the editing template comprises 68 to 80 nucleotides 3′ to the nucleotide edit to be incorporated to the target ATP7B gene sequence. In some embodiments, the editing template comprises 69 to 80 nucleotides 3′ to the nucleotide edit to be incorporated to the target ATP7B gene sequence. In some embodiments, the editing template comprises 70 to 80 nucleotides 3′ to the nucleotide edit to be incorporated to the target ATP7B gene sequence. In some embodiments, the editing template comprises 71 to 80 nucleotides 3′ to the nucleotide edit to be incorporated to the target ATP7B gene sequence. In some embodiments, the editing template comprises 72 to 80 nucleotides 3′ to the nucleotide edit to be incorporated to the target ATP7B gene sequence. In some embodiments, the editing template comprises 73 to 80 nucleotides 3′ to the nucleotide edit to be incorporated to the target ATP7B gene sequence. In some embodiments, the editing template comprises 74 to 80 nucleotides 3′ to the nucleotide edit to be incorporated to the target ATP7B gene sequence. In some embodiments, the editing template comprises 75 to 80 nucleotides 3′ to the nucleotide edit to be incorporated to the target ATP7B gene sequence. In some embodiments, the editing template comprises 76 to 80 nucleotides 3′ to the nucleotide edit to be incorporated to the target ATP7B gene sequence. In some embodiments, the editing template comprises 77 to 80 nucleotides 3′ to the nucleotide edit to be incorporated to the target ATP7B gene sequence. In some embodiments, the editing template comprises 78 to 80 nucleotides 3′ to the nucleotide edit to be incorporated to the target ATP7B gene sequence. In some embodiments, the editing template comprises 79 to 80 nucleotides 3′ to the nucleotide edit to be incorporated to the target ATP7B gene sequence.

[0244] In some embodiments, the editing template comprises 2 to 40 nucleotides 3′ to the nucleotide edit to be incorporated to the target ATP7B gene sequence. In some embodiments, the editing template comprises 2 to 38 nucleotides 3′ to the nucleotide edit to be incorporated to the target ATP7B gene sequence. In some embodiments, the editing template comprises 2 to 36 nucleotides 3′ to the nucleotide edit to be incorporated to the target ATP7B gene sequence. In some embodiments, the editing template comprises 2 to 34 nucleotides 3′ to the nucleotide edit to be incorporated to the target ATP7B gene sequence. In some embodiments, the editing template comprises 2 to 32 nucleotides 3′ to the nucleotide edit to be incorporated to the target ATP7B gene sequence. In some embodiments, the editing template comprises 4 to 30 nucleotides 3′ to the nucleotide edit to be incorporated to the target ATP7B gene sequence. In some embodiments, the editing template comprises 2 to 25 nucleotides 3′ to the nucleotide edit to be incorporated to the target ATP7B gene sequence. In some embodiments, the editing template comprises 2 to 20 nucleotides 3′ to the nucleotide edit to be incorporated to the target ATP7B gene sequence. In some embodiments, the editing template comprises 2 to 15 nucleotides 3′ to the nucleotide edit to be incorporated to the target ATP7B gene sequence. In some embodiments, the editing template comprises 2 to 10 nucleotides 3′ to the nucleotide edit to be incorporated to the target ATP7B gene sequence. In some embodiments, the editing template comprises 2 to 5 nucleotides 3′ to the nucleotide edit to be incorporated to the target ATP7B gene sequence. In some embodiments, the editing template comprises 4 to 25 nucleotides 3′ to the nucleotide edit to be incorporated to the target ATP7B gene sequence. In some embodiments, the editing template comprises 4 to 20 nucleotides 3′ to the nucleotide edit to be incorporated to the target ATP7B gene sequence. In some embodiments, the editing template comprises 4 to 25 nucleotides 3′ to the nucleotide edit to be incorporated to the target ATP7B gene sequence. In some embodiments, the editing template comprises 4 to 15 nucleotides 3′ to the nucleotide edit to be incorporated to the target ATP7B gene sequence. In some embodiments, the editing template comprises 4 to 10 nucleotides 3′ to the nucleotide edit to be incorporated to the target ATP7B gene sequence. In some embodiments, the editing template comprises 10 to 15 nucleotides 3′ to the nucleotide edit to be incorporated to the target ATP7B gene sequence. In some embodiments, the editing template comprises 10 to 20 nucleotides 3′ to the nucleotide edit to be incorporated to the target ATP7B gene sequence. In some embodiments, the editing template comprises 10 to 30 nucleotides 3′ to the nucleotide edit to be incorporated to the target ATP7B gene sequence. In some embodiments, the editing template comprises 4 to 30 nucleotides 5′ to the nucleotide edit to be incorporated to the target ATP7B gene sequence. In some embodiments, the editing template comprises 4 to 25 nucleotides 5′ to the nucleotide edit to be incorporated to the target ATP7B gene sequence. In some embodiments, the editing template comprises 4 to 20 nucleotides 5′ to the nucleotide edit to be incorporated to the target ATP7B gene sequence.

[0245] In some embodiments, the length of the editing template is at least 2, 3, 4, 5, 6, 7, 8, 9, 10, 11, 12, 13, 14, 15, 16, 17, 18, 19, 20, 21, 22, 23, 24, 25, 26, 27, 28, 29, 30, 31, 32, 33, 34, 35, 36, 37, 38, 39, 40, 41, 42, 43, 44, 45, 46, 47, 48, 49, 50, 51, 52, 53, 54, 55, 56, 57, 58, 59, 60, 61, 62, 63, 64, 65, 66, 67, 68, 69, 70, 71, 72, 73, 74, 75, 76, 77, 78, 79, or 80 nucleotides longer than the nick to edit distance. In some embodiments, for example, the nick to edit distance is 8 nucleotides, and the editing template is 10 to 15, 10 to 20, 10 to 25, 10 to 30, 10 to 35, 10 to 40, 10 to 45, 10 to 50, 10 to 55, 10 to 60, 10 to 65, 10 to 70, 10 to 75, or 10 to 80 nucleotides in length. In some embodiments, the nick to edit distance is 22 nucleotides, and the editing template is 24 to 28, 24 to 30, 24 to 32, 24 to 34, 24 to 36, 24 to 37, 24 to 38, 24 to 40, 24 to 45, 24 to 50, 24 to 55, 24 to 60, 24 to 65, 24 to 70, 24 to 75, 24 to 80, 24 to 85, 24 to 90, 24 to 95, 24 to 100, 24 to 105, 24 to 100, 24 to 105, or 24 to 110 nucleotides in length.

[0246] In some embodiments, the editing template comprises an adenine at the first nucleobase position (e.g., for a PEgRNA following 5′-spacer-gRNA core-RTT-PBS-3′ orientation, the 5′ most nucleobase is the “first base”). In some embodiments, the editing template comprises a guanine at the first nucleobase position (e.g., for a PEgRNA following 5′-spacer-gRNA core-RTT-PBS-3′ orientation, the 5′ most nucleobase is the “first base”). In some embodiments, the editing template comprises an uracil at the first nucleobase position (e.g., for a PEgRNA following 5′-spacer-gRNA core-RTT-PBS-3′ orientation, the 5′ most nucleobase is the “first base”). In some embodiments, the editing template comprises a cytosine at the first nucleobase position (e.g., for a PEgRNA following 5′-spacer-gRNA core-RTT-PBS-3′ orientation, the 5′ most nucleobase is the “first base”). In some embodiments, the editing template does not comprise a cytosine at the first nucleobase position (e.g., for a PEgRNA following 5′-spacer-gRNA core-RT T-PBS-3′ orientation, the 5′ most nucleobase is the “first base”).

[0247] The editing template of a PEgRNA may encode a new single stranded DNA (e.g. by reverse transcription) to replace a editing target sequence in the target gene. In some embodiments, the editing target sequence in the edit strand of the target gene is replaced by the newly synthesized strand, and the nucleotide edit(s) are incorporated in the region of the target gene. In some embodiments, the target gene is an ATP7B gene. In some embodiments, the editing template of the PEgRNA encodes a newly synthesized single stranded DNA that comprises a wild type APT7B gene sequence. In some embodiments, the newly synthesized DNA strand replaces the editing target sequence in the target ATP7B gene, wherein the editing target sequence (or the endogenous sequence complementary to the editing target sequence on the target strand of the ATP7B gene) comprises a mutation compared to a wild type ATP7B gene. In some embodiments, the mutation is associated with Wilson's disease.

[0248] In some embodiments, the editing target sequence comprises a mutation in exon 1, exon 2, exon 3, exon 4, exon 5, exon 6, exon 7, exon 8, exon 9, exon 10, exon 11, exon 12, exon 13, exon 14, exon 15, exon 16, exon 17, exon 18, exon 19, exon 20, or exon 21 of the ATP7B gene as compared to a wild type ATP7B gene. In some embodiments, the editing target sequence comprises a mutation in exon 8, exon 13, exon 14, exon 15, or exon 17 of the ATP7B gene as compared to a wild type ATP7B gene. In some embodiments, the editing target sequence comprises a mutation in exon 14 of the ATP7B gene as compared to a wild type ATP7B gene. In some embodiments, the editing target sequence comprises a mutation in exon 3 of the ATP7B gene as compared to a wild type ATP7B gene. In some embodiments, the editing target sequence comprises a mutation that is located in exon 8 of the ATP7B gene as compared to a wild type ATP7B gene. In some embodiments, the mutation is not a c.1288dup duplication. In some embodiments, the editing target sequence comprises a mutation that is located between positions 51932669 and 52012130 of human chromosome 13 as set forth in human genome assembly consortium Human build 38 (GRCh38), GenBank accession GCA_000001405.15. In some embodiments, the editing target sequence comprises a mutation that is located between positions 51944045 and 51944245 of human chromosome 13 as set forth in human genome assembly consortium Human build 38 (GRCh38), GenBank accession GCA_000001405.15. In some embodiments, the editing target sequence comprises a mutation that encodes an amino acid substitution H1069Q relative to a wild type ATP7B polypeptide set forth in SEQ ID NO: 5861. In some embodiments, the editing target sequence comprises a C>A mutation at position 51944145 in human chromosome 13 as set forth in human genome assembly consortium Human build 38 (GRCh38), GenBank accession GCA_000001405.15. As used herein, unless otherwise noted, reference to positions in human genome is as set forth in human genome assembly consortium Human build 38 (GRCh38), GenBank accession GCA_000001405.15.

[0249] A guide RNA core (also referred to herein as the gRNA core, gRNA scaffold, or gRNA backbone sequence) of a PEgRNA may contain a polynucleotide sequence that binds to a DNA binding domain (e.g., Cas9) of a prime editor. The gRNA core may interact with a prime editor as described herein, for example, by association with a DNA binding domain, such as a DNA nickase of the prime editor.

[0250] One of skill in the art will recognize that different prime editors having different DNA binding domains from different DNA binding proteins may require different gRNA core sequences specific to the DNA binding protein. In some embodiments, the gRNA core is capable of binding to a Cas9-based prime editor. In some embodiments, the gRNA core is capable of binding to a Cpf1-based prime editor. In some embodiments, the gRNA core is capable of binding to a Cas12b-based prime editor.

[0251] In some embodiments, the gRNA core comprises regions and secondary structures involved in binding with specific CRISPR Cas proteins. For example, in a Cas9 based prime editing system, the gRNA core of a PEgRNA may comprise one or more regions of a base paired “lower stem” adjacent to the spacer sequence and a base paired “upper stem” following the lower stem, where the lower stem and upper stem may be connected by a “bulge” comprising unpaired RNAs. The gRNA core may further comprise a “nexus” distal from the spacer sequence, followed by a hairpin structure, e.g., at the 3′ end, as exemplified in FIG. 4. In some embodiments, the gRNA core comprises modified nucleotides as compared to a wild type gRNA core in the lower stem, upper stem, and/or the hairpin. For example, nucleotides in the lower stem, upper stem, an/or the hairpin regions may be modified, deleted, or replaced. In some embodiments. RNA nucleotides in the lower stem, upper stem, an/or the hairpin regions may be replaced with one or more DNA sequences. In some embodiments, the gRNA core comprises unmodified or wild type RNA sequences in the nexus and/or the bulge regions. In some embodiments, the gRNA core does not include long stretches of A-T pairs, for example, a GUUUU-AAAAC pairing element.

[0252] In some embodiments, a prime editing system comprises a prime editor and a PEgRNA, wherein the prime editor comprises a SpCas9 nickase or a variant thereof, and the gRNA core of the PEgRNA comprises the sequence:

(SEQ ID NO: 5857)
GUUUUAGAGCUAGAAAUAGCAAGUUAAAAUAAGGCUAGUCCGUUAUCAAC
UUGAAAAAGUGGCACCGAGUCGGUGC;
(SEQ ID NO: 5858)
GUUUGAGAGCUAGAAAUAGCAAGUUUAAAUAAGGCUAGUCCGUUAUCAAC
UUGAAAAAGUGGGACCGAGUCGGUCC,
or
(SEQ ID NO: 5859)
GUUUAAGAGCUAUGCUGGAAACAGCAUAGCAAGUUUAAAUAAGGCUAGUC
CGUUAUCAACUUGAAAAAGUGGCACCGAGUCGGUGC.

In some embodiments, the gRNA core comprises the sequence

(SEQ ID NO: 5857)
GUUUUAGAGCUAGAAAUAGCAAGUUAAAAUAAGGCUAGUCCGUUAUCAAC
UUGAAAAAGUGGCACCGAGUCGGUGC.

[0253] Any gRNA core sequences known in the art are also contemplated in the prime editing compositions described herein.

[0254] A PEgRNA may also comprise optional modifiers, e.g., 3′ end modifier region and/or an 5′ end modifier region. In some embodiments, a PEgRNA comprises at least one nucleotide that is not part of a spacer, a gRNA core, or an extension arm. The optional sequence modifiers could be positioned within or between any of the other regions shown, and not limited to being located at the 3′ and 5′ ends. In certain embodiments, the PEgRNA comprises secondary RNA structure, such as, but not limited to, aptamers, hairpins, stem/loops, toeloops, and/or RNA-binding protein recruitment domains (e.g., the MS2 aptamer which recruits and binds to the MS2cp protein). In some embodiments, a PEgRNA comprises a short stretch of uracil at the 5′ end or the 3′ end. For example, in some embodiments, a PEgRNA comprising a 3′ extension arm comprises a “UUU” sequence at the 3′ end of the extension arm. In some embodiments, a PEgRNA comprises a toeloop sequence at the 3′ end. In some embodiments, the PEgRNA comprises a 3′ extension arm and a toeloop sequence at the 3′ end of the extension arm. In some embodiments, the PEgRNA comprises a 5′ extension arm and a toeloop sequence at the 5′ end of the extension arm. In some embodiments, the PEgRNA comprises a toeloop element having the sequence 5′-GAAANNNNN-3′, wherein N is any nucleobase. In some embodiments, the secondary RNA structure is positioned within the spacer. In some embodiments, the secondary structure is positioned within the extension arm. In some embodiments, the secondary structure is positioned within the gRNA core. In some embodiments, the secondary structure is positioned between the spacer and the gRNA core, between the gRNA core and the extension arm, or between the spacer and the extension arm. In some embodiments, the secondary structure is positioned between the PBS and the editing template. In some embodiments the secondary structure is positioned at the 3′ end or at the 5′ end of the PEgRNA. In some embodiments, the PEgRNA comprises a transcriptional termination signal at the 3′ end of the PEgRNA. In addition to secondary RNA structures, the PEgRNA may comprise a chemical linker or a poly(N) linker or tail, where “N” can be any nucleobase. In some embodiments, the chemical linker may function to prevent reverse transcription of the gRNA core.

[0255] In some embodiments, a prime editing system or composition further comprises a nick guide polynucleotide, such as a nick guide RNA (ngRNA). Without wishing to be bound by any particular theory, the non-edit strand of a double stranded target DNA in the target gene may be nicked by a CRISPR-Cas nickase directed by an ngRNA. In some embodiments, the nick on the non-edit strand directs endogenous DNA repair machinery to use the edit strand as a template for repair of the non-edit strand, which may increase efficiency of prime editing. In some embodiments, the non-edit strand is nicked by a prime editor localized to the non-edit strand by the ngRNA. Accordingly, also provided herein are PEgRNA systems comprising at least one PEgRNA and at least one ngRNA.

[0256] In some embodiments, the ngRNA is a guide RNA which contains a variable spacer sequence and a guide RNA scaffold or core region that interacts with the DNA binding domain, e.g. Cas9 of the prime editor. In some embodiments, the ngRNA comprises a spacer sequence (referred to herein as an ng spacer, or a second spacer) that is substantially complementary to a second search target sequence (or ng search target sequence), which is located on the edit strand, or the non-target strand. Thus, in some embodiments, the ng search target sequence recognized by the ng spacer and the search target sequence recognized by the spacer sequence of the PEgRNA are on opposite strands of the double stranded target DNA of target gene, e.g., the ATP7B gene. A prime editing system or complex comprising a ngRNA may be referred to as a “PE3” prime editing system or PE3 prime editing complex.

[0257] In some embodiments, the ng search target sequence is located on the non-target strand, within 10 base pairs to 100 base pairs of an intended nucleotide edit incorporated by the PEgRNA on the edit strand. In some embodiments, the ng target search target sequence is within 10 bp, 20 bp, 30 bp, 40 bp, 50 bp, 60 bp, 70 bp, 80 bp, 90 bp, 91 bp, 92 bp, 93 bp, 94 bp, 95 bp, 96 bp, 97 bp, 98 bp, 99 bp, or 100 bp of an intended nucleotide edit incorporated by the PEgRNA on the edit strand. In some embodiments, the 5′ ends of the ng search target sequence and the PEgRNA search target sequence are within 1, 2, 3, 4, 5, 6, 7, 8, 9, or 10 bp apart from each other. In some embodiments, the 5′ ends of the ng search target sequence and the PEgRNA search target sequence are within 10 bp, 20 bp, 30 bp, 40 bp, 50 bp, 60 bp, 70 bp, 80 bp, 90 bp, 91 bp, 92 bp, 93 bp, 94 bp, 95 bp, 96 bp, 97 bp, 98 bp, 99 bp, or 100 bp apart from each other.

[0258] In some embodiments, an ng spacer sequence is complementary to, and may hybridize with the second search target sequence only after an intended nucleotide edit has been incorporated on the edit strand, by the editing template of a PEgRNA. Such a prime editing system maybe referred to as a “PE3b” prime editing system or composition. In some embodiments, the ngRNA comprises a spacer sequence that matches only the edit strand after incorporation of the nucleotide edits, but not the endogenous target gene sequence on the edit strand. Accordingly, in some embodiments, an intended nucleotide edit is incorporated within the ng search target sequence. In some embodiments, the intended nucleotide edit is incorporated within about 1-10 nucleotides of the position corresponding to the PAM of the ng search target sequence.

[0259] Exemplary combinations of PEgRNA components, e.g., spacer, PBS, and RTT, as well as combinations of each PEgRNA and corresponding ngRNA(s) are provided in Tables 6-12 and 15-32. Tables 6-12, 15-32 each contains two columns, the left column lists the respective PEgRNA components, and the right column is the corresponding sequence identifiers. Each of the PEgRNA components in Tables 6-12, 15-32 is listed consecutively and should be read from left to right, continuously.

TABLE 6

| Sequence region | SEQ ID |
|---|---|
| pegRNA Spacer | 1 |
| PBS | 2 |
| PBS | 3 |
| PBS | 4 |
| PBS | 5 |
| PBS | 6 |
| PBS | 7 |
| PBS | 8 |
| PBS | 9 |
| PBS | 10 |
| PBS | 11 |
| PBS | 12 |
| RTT | 13 |
| RTT | 14 |
| RTT | 15 |
| RTT | 16 |
| RTT | 17 |
| ngRNA Spacer | 18 |
| ngRNA Spacer | 19 |
| ngRNA Spacer | 20 |
| ngRNA Spacer | 21 |
| ngRNA Spacer | 22 |
| ngRNA Spacer | 23 |
| ngRNA Spacer | 24 |
| ngRNA Spacer | 25 |
| ngRNA Spacer | 26 |
| ngRNA Spacer | 27 |
| ngRNA Spacer | 28 |
| ngRNA Spacer | 29 |
| ngRNA Spacer | 30 |
| ngRNA Spacer | 31 |
| ngRNA Spacer | 32 |
| ngRNA Spacer | 33 |
| ngRNA Spacer | 34 |
| ngRNA Spacer | 35 |
| ngRNA Spacer | 36 |
| ngRNA Spacer | 37 |
| ngRNA Spacer | 38 |
| ngRNA Spacer | 39 |
| ngRNA Spacer | 40 |
| ngRNA Spacer | 41 |
| ngRNA Spacer | 42 |
| ngRNA Spacer | 43 |
| ngRNA Spacer | 44 |
| ngRNA Spacer | 45 |
| ngRNA Spacer | 46 |
| ngRNA Spacer | 47 |
| ngRNA Spacer | 48 |
| ngRNA Spacer | 49 |
| ngRNA Spacer | 50 |
| ngRNA Spacer | 51 |
| ngRNA Spacer | 52 |
| ngRNA Spacer | 53 |
| ngRNA Spacer | 54 |
| ngRNA Spacer | 55 |
| ngRNA Spacer | 56 |
| ngRNA Spacer | 57 |
| ngRNA Spacer | 58 |
| ngRNA Spacer | 59 |
| ngRNA Spacer | 60 |
| ngRNA Spacer | 61 |
| ngRNA Spacer | 62 |
| ngRNA Spacer | 63 |
| ngRNA Spacer | 64 |
| ngRNA Spacer | 65 |
| ngRNA Spacer | 66 |
| ngRNA Spacer | 67 |
| ngRNA Spacer | 68 |
| ngRNA Spacer | 69 |
| ngRNA Spacer | 70 |
| ngRNA Spacer | 71 |
| ngRNA Spacer | 72 |
| pegRNA | 73 |
| pegRNA | 74 |
| pegRNA | 75 |
| pegRNA | 76 |
| pegRNA | 77 |
| pegRNA | 78 |
| pegRNA | 79 |
| pegRNA | 80 |
| pegRNA | 81 |
| pegRNA | 82 |
| pegRNA | 83 |
| pegRNA | 84 |
| pegRNA | 85 |
| pegRNA | 86 |
| pegRNA | 87 |
| pegRNA | 88 |
| pegRNA | 89 |
| pegRNA | 90 |
| pegRNA | 91 |
| pegRNA | 92 |
| pegRNA | 93 |
| pegRNA | 94 |
| pegRNA | 95 |
| pegRNA | 96 |
| pegRNA | 97 |
| pegRNA | 98 |
| pegRNA | 99 |
| pegRNA | 100 |
| pegRNA | 101 |
| pegRNA | 102 |
| pegRNA | 103 |
| pegRNA | 104 |
| pegRNA | 105 |
| pegRNA | 106 |
| pegRNA | 107 |
| pegRNA | 108 |
| pegRNA | 109 |
| pegRNA | 110 |
| pegRNA | 111 |
| pegRNA | 112 |
| pegRNA | 113 |
| pegRNA | 114 |
| pegRNA | 115 |
| pegRNA | 116 |
| pegRNA | 117 |
| pegRNA | 118 |
| pegRNA | 119 |
| pegRNA | 120 |
| pegRNA | 121 |
| pegRNA | 122 |
| pegRNA | 123 |
| pegRNA | 124 |
| pegRNA | 125 |
| pegRNA | 126 |
| pegRNA | 127 |
| pegRNA | 128 |
| pegRNA | 129 |
| pegRNA | 130 |
| pegRNA | 131 |
| pegRNA | 132 |
| pegRNA | 133 |
| pegRNA | 134 |
| pegRNA | 135 |
| pegRNA | 136 |
| pegRNA | 137 |
| pegRNA | 138 |
| pegRNA | 139 |
| pegRNA | 140 |
| pegRNA | 141 |
| pegRNA | 142 |
| pegRNA | 143 |
| pegRNA | 144 |
| pegRNA | 145 |
| pegRNA | 146 |
| pegRNA | 147 |
| pegRNA | 148 |
| pegRNA | 149 |
| pegRNA | 150 |
| pegRNA | 151 |
| pegRNA | 152 |
| ngRNA | 153 |
| ngRNA | 154 |
| ngRNA | 155 |
| ngRNA | 156 |
| ngRNA | 157 |
| ngRNA | 158 |
| ngRNA | 159 |
| ngRNA | 160 |
| ngRNA | 161 |
| ngRNA | 162 |
| ngRNA | 163 |
| ngRNA | 164 |
| ngRNA | 165 |
| ngRNA | 166 |
| ngRNA | 167 |
| ngRNA | 168 |
| ngRNA | 169 |
| ngRNA | 170 |
| ngRNA | 171 |
| ngRNA | 172 |
| ngRNA | 173 |
| ngRNA | 174 |
| ngRNA | 175 |
| ngRNA | 176 |
| ngRNA | 177 |
| ngRNA | 178 |
| ngRNA | 179 |
| ngRNA | 180 |
| ngRNA | 181 |

TABLE 7

| Sequence region | SEQ ID |
|---|---|
| pegRNA Spacer | 182 |
| PBS | 183 |
| PBS | 184 |
| PBS | 185 |
| PBS | 186 |
| PBS | 187 |
| PBS | 188 |
| PBS | 189 |
| PBS | 190 |
| PBS | 191 |
| PBS | 192 |
| PBS | 193 |
| RTT | 194 |
| RTT | 195 |
| RTT | 196 |
| RTT | 197 |
| RTT | 198 |
| ngRNA Spacer | 42 |
| ngRNA Spacer | 22 |
| ngRNA Spacer | 55 |
| ngRNA Spacer | 54 |
| ngRNA Spacer | 199 |
| ngRNA Spacer | 62 |
| ngRNA Spacer | 34 |
| ngRNA Spacer | 72 |
| ngRNA Spacer | 63 |
| ngRNA Spacer | 43 |
| ngRNA Spacer | 66 |
| ngRNA Spacer | 200 |
| ngRNA Spacer | 28 |
| ngRNA Spacer | 30 |
| ngRNA Spacer | 20 |
| ngRNA Spacer | 50 |
| ngRNA Spacer | 35 |
| ngRNA Spacer | 27 |
| ngRNA Spacer | 31 |
| ngRNA Spacer | 48 |
| ngRNA Spacer | 61 |
| ngRNA Spacer | 69 |
| ngRNA Spacer | 26 |
| ngRNA Spacer | 45 |
| ngRNA Spacer | 37 |
| ngRNA Spacer | 33 |
| ngRNA Spacer | 60 |
| ngRNA Spacer | 58 |
| ngRNA Spacer | 68 |
| ngRNA Spacer | 70 |
| ngRNA Spacer | 25 |
| ngRNA Spacer | 46 |
| ngRNA Spacer | 24 |
| ngRNA Spacer | 38 |
| ngRNA Spacer | 56 |
| ngRNA Spacer | 201 |
| ngRNA Spacer | 36 |
| ngRNA Spacer | 44 |
| ngRNA Spacer | 57 |
| ngRNA Spacer | 23 |
| ngRNA Spacer | 21 |
| ngRNA Spacer | 202 |
| ngRNA Spacer | 41 |
| ngRNA Spacer | 29 |
| ngRNA Spacer | 203 |
| ngRNA Spacer | 71 |
| ngRNA Spacer | 32 |
| ngRNA Spacer | 67 |
| ngRNA Spacer | 19 |
| ngRNA Spacer | 39 |
| ngRNA Spacer | 51 |
| ngRNA Spacer | 47 |
| ngRNA Spacer | 40 |
| ngRNA Spacer | 204 |
| ngRNA Spacer | 64 |
| ngRNA Spacer | 205 |
| ngRNA Spacer | 53 |
| ngRNA Spacer | 206 |
| ngRNA Spacer | 65 |
| ngRNA Spacer | 207 |
| ngRNA Spacer | 18 |
| ngRNA Spacer | 52 |
| ngRNA Spacer | 208 |
| ngRNA Spacer | 59 |
| ngRNA Spacer | 49 |
| ngRNA Spacer | 209 |
| pegRNA | 210 |
| pegRNA | 211 |
| pegRNA | 212 |
| pegRNA | 213 |
| pegRNA | 214 |
| pegRNA | 215 |
| pegRNA | 216 |
| pegRNA | 217 |
| pegRNA | 218 |
| pegRNA | 219 |
| pegRNA | 220 |
| pegRNA | 221 |
| pegRNA | 222 |
| pegRNA | 223 |
| pegRNA | 224 |
| pegRNA | 225 |
| pegRNA | 226 |
| pegRNA | 227 |
| pegRNA | 228 |
| pegRNA | 229 |
| pegRNA | 230 |
| pegRNA | 231 |
| pegRNA | 232 |
| pegRNA | 233 |
| pegRNA | 234 |
| pegRNA | 235 |
| pegRNA | 236 |
| pegRNA | 237 |
| pegRNA | 238 |
| pegRNA | 239 |
| pegRNA | 240 |
| pegRNA | 241 |
| pegRNA | 242 |
| pegRNA | 243 |
| pegRNA | 244 |
| pegRNA | 245 |
| pegRNA | 246 |
| pegRNA | 247 |
| pegRNA | 248 |
| pegRNA | 249 |
| pegRNA | 250 |
| pegRNA | 251 |
| pegRNA | 252 |
| pegRNA | 253 |
| pegRNA | 254 |
| pegRNA | 255 |
| pegRNA | 256 |
| pegRNA | 257 |
| pegRNA | 258 |
| pegRNA | 259 |
| pegRNA | 260 |
| pegRNA | 261 |
| pegRNA | 262 |
| pegRNA | 263 |
| pegRNA | 265 |
| pegRNA | 266 |
| pegRNA | 267 |
| pegRNA | 268 |
| pegRNA | 269 |
| pegRNA | 270 |
| pegRNA | 271 |
| pegRNA | 272 |
| pegRNA | 273 |
| pegRNA | 274 |
| pegRNA | 275 |
| pegRNA | 276 |
| pegRNA | 277 |
| pegRNA | 278 |
| pegRNA | 279 |
| pegRNA | 280 |
| pegRNA | 281 |
| pegRNA | 282 |
| pegRNA | 283 |
| pegRNA | 284 |
| pegRNA | 285 |
| pegRNA | 286 |
| pegRNA | 287 |
| pegRNA | 288 |
| pegRNA | 289 |
| ngRNA | 153 |
| ngRNA | 156 |
| ngRNA | 163 |
| ngRNA | 162 |
| ngRNA | 165 |
| ngRNA | 169 |
| ngRNA | 158 |
| ngRNA | 164 |
| ngRNA | 290 |
| ngRNA | 159 |
| ngRNA | 155 |
| ngRNA | 161 |
| ngRNA | 168 |
| ngRNA | 167 |
| ngRNA | 157 |
| ngRNA | 291 |
| ngRNA | 166 |
| ngRNA | 154 |
| ngRNA | 160 |
| ngRNA | 173 |
| ngRNA | 175 |
| ngRNA | 177 |
| ngRNA | 170 |
| ngRNA | 292 |
| ngRNA | 176 |
| ngRNA | 172 |
| ngRNA | 179 |
| ngRNA | 293 |
| ngRNA | 178 |
| ngRNA | 180 |
| ngRNA | 171 |
| ngRNA | 181 |
| ngRNA | 174 |

TABLE 8

| Sequence region | SEQ ID |
|---|---|
| pegRNA Spacer | 294 |
| PBS | 295 |
| PBS | 296 |
| PBS | 297 |
| PBS | 298 |
| PBS | 299 |
| PBS | 300 |
| PBS | 301 |
| PBS | 302 |
| PBS | 303 |
| PBS | 304 |
| PBS | 305 |
| RTT | 306 |
| RTT | 307 |
| RTT | 308 |
| RTT | 309 |
| RTT | 310 |
| RTT | 311 |
| RTT | 312 |
| RTT | 313 |
| RTT | 314 |
| RTT | 315 |
| RTT | 316 |
| RTT | 317 |
| RTT | 318 |
| RTT | 319 |
| RTT | 320 |
| RTT | 321 |
| RTT | 322 |
| RTT | 323 |
| RTT | 324 |
| RTT | 325 |
| RTT | 326 |
| RTT | 327 |
| RTT | 328 |
| RTT | 329 |
| RTT | 330 |
| RTT | 331 |
| RTT | 332 |
| RTT | 333 |
| RTT | 334 |
| RTT | 335 |
| RTT | 336 |
| ngRNA Spacer | 69 |
| ngRNA Spacer | 63 |
| ngRNA Spacer | 62 |
| ngRNA Spacer | 66 |
| ngRNA Spacer | 61 |
| ngRNA Spacer | 71 |
| ngRNA Spacer | 67 |
| ngRNA Spacer | 53 |
| ngRNA Spacer | 59 |
| ngRNA Spacer | 24 |
| ngRNA Spacer | 52 |
| ngRNA Spacer | 39 |
| ngRNA Spacer | 40 |
| ngRNA Spacer | 20 |
| ngRNA Spacer | 200 |
| ngRNA Spacer | 46 |
| ngRNA Spacer | 35 |
| ngRNA Spacer | 201 |
| ngRNA Spacer | 206 |
| ngRNA Spacer | 36 |
| ngRNA Spacer | 70 |
| ngRNA Spacer | 28 |
| ngRNA Spacer | 45 |
| ngRNA Spacer | 47 |
| ngRNA Spacer | 27 |
| ngRNA Spacer | 29 |
| ngRNA Spacer | 44 |
| ngRNA Spacer | 204 |
| ngRNA Spacer | 19 |
| ngRNA Spacer | 202 |
| ngRNA Spacer | 65 |
| ngRNA Spacer | 207 |
| ngRNA Spacer | 64 |
| ngRNA Spacer | 37 |
| ngRNA Spacer | 60 |
| ngRNA Spacer | 205 |
| ngRNA Spacer | 57 |
| ngRNA Spacer | 209 |
| ngRNA Spacer | 18 |
| ngRNA Spacer | 51 |
| ngRNA Spacer | 49 |
| ngRNA Spacer | 42 |
| ngRNA Spacer | 56 |
| ngRNA Spacer | 208 |
| ngRNA Spacer | 33 |
| ngRNA Spacer | 199 |
| ngRNA Spacer | 54 |
| ngRNA Spacer | 43 |
| ngRNA Spacer | 55 |
| ngRNA Spacer | 58 |
| ngRNA Spacer | 41 |
| ngRNA Spacer | 25 |
| ngRNA Spacer | 26 |
| ngRNA Spacer | 34 |
| ngRNA Spacer | 38 |
| ngRNA Spacer | 68 |
| ngRNA Spacer | 72 |
| ngRNA Spacer | 23 |
| ngRNA Spacer | 203 |
| ngRNA Spacer | 32 |
| ngRNA Spacer | 50 |
| ngRNA Spacer | 337 |
| ngRNA Spacer | 22 |
| ngRNA Spacer | 48 |
| ngRNA Spacer | 31 |
| ngRNA Spacer | 21 |
| pegRNA | 338 |
| pegRNA | 339 |
| pegRNA | 340 |
| pegRNA | 341 |
| pegRNA | 342 |
| pegRNA | 343 |
| pegRNA | 344 |
| pegRNA | 345 |
| pegRNA | 346 |
| pegRNA | 347 |
| pegRNA | 348 |
| pegRNA | 349 |
| pegRNA | 349 |
| pegRNA | 351 |
| pegRNA | 352 |
| pegRNA | 353 |
| pegRNA | 354 |
| pegRNA | 355 |
| pegRNA | 356 |
| pegRNA | 357 |
| pegRNA | 356 |
| pegRNA | 358 |
| pegRNA | 359 |
| pegRNA | 360 |
| pegRNA | 361 |
| pegRNA | 362 |
| pegRNA | 363 |
| pegRNA | 364 |
| pegRNA | 365 |
| pegRNA | 366 |
| pegRNA | 366 |
| pegRNA | 365 |
| pegRNA | 367 |
| pegRNA | 368 |
| pegRNA | 369 |
| pegRNA | 370 |
| pegRNA | 371 |
| pegRNA | 372 |
| pegRNA | 373 |
| pegRNA | 374 |
| pegRNA | 375 |
| pegRNA | 375 |
| pegRNA | 376 |
| pegRNA | 377 |
| pegRNA | 378 |
| pegRNA | 379 |
| pegRNA | 380 |
| pegRNA | 381 |
| pegRNA | 382 |
| pegRNA | 383 |
| pegRNA | 384 |
| pegRNA | 385 |
| pegRNA | 386 |
| pegRNA | 387 |
| pegRNA | 388 |
| pegRNA | 389 |
| pegRNA | 389 |
| pegRNA | 390 |
| pegRNA | 390 |
| pegRNA | 391 |
| pegRNA | 392 |
| pegRNA | 393 |
| pegRNA | 394 |
| pegRNA | 395 |
| pegRNA | 396 |
| pegRNA | 397 |
| pegRNA | 398 |
| pegRNA | 399 |
| pegRNA | 400 |
| pegRNA | 401 |
| pegRNA | 402 |
| pegRNA | 403 |
| pegRNA | 404 |
| pegRNA | 405 |
| pegRNA | 406 |
| pegRNA | 407 |
| pegRNA | 408 |
| pegRNA | 409 |
| pegRNA | 410 |
| pegRNA | 411 |
| pegRNA | 412 |
| pegRNA | 413 |
| pegRNA | 414 |
| pegRNA | 415 |
| pegRNA | 416 |
| pegRNA | 417 |
| pegRNA | 417 |
| pegRNA | 418 |
| pegRNA | 419 |
| pegRNA | 420 |
| pegRNA | 421 |
| pegRNA | 422 |
| pegRNA | 423 |
| pegRNA | 424 |
| pegRNA | 425 |
| pegRNA | 426 |
| pegRNA | 427 |
| pegRNA | 428 |
| pegRNA | 429 |
| pegRNA | 430 |
| pegRNA | 431 |
| pegRNA | 432 |
| pegRNA | 433 |
| pegRNA | 434 |
| pegRNA | 435 |
| pegRNA | 436 |
| pegRNA | 437 |
| pegRNA | 438 |
| pegRNA | 439 |
| pegRNA | 440 |
| pegRNA | 441 |
| pegRNA | 442 |
| pegRNA | 443 |
| pegRNA | 444 |
| pegRNA | 445 |
| pegRNA | 446 |
| pegRNA | 447 |
| pegRNA | 448 |
| pegRNA | 449 |
| pegRNA | 450 |
| pegRNA | 451 |
| pegRNA | 452 |
| pegRNA | 453 |
| pegRNA | 454 |
| pegRNA | 455 |
| pegRNA | 456 |
| pegRNA | 457 |
| pegRNA | 458 |
| pegRNA | 459 |
| pegRNA | 460 |
| pegRNA | 461 |
| pegRNA | 462 |
| pegRNA | 463 |
| pegRNA | 464 |
| pegRNA | 465 |
| pegRNA | 466 |
| pegRNA | 467 |
| pegRNA | 468 |
| pegRNA | 469 |
| pegRNA | 470 |
| pegRNA | 471 |
| pegRNA | 472 |
| pegRNA | 473 |
| pegRNA | 474 |
| pegRNA | 475 |
| pegRNA | 476 |
| pegRNA | 477 |
| pegRNA | 478 |
| pegRNA | 479 |
| pegRNA | 480 |
| pegRNA | 481 |
| pegRNA | 482 |
| ngRNA | 162 |
| ngRNA | 154 |
| ngRNA | 291 |
| ngRNA | 153 |
| ngRNA | 161 |
| ngRNA | 164 |
| ngRNA | 157 |
| ngRNA | 155 |
| ngRNA | 159 |
| ngRNA | 160 |
| ngRNA | 290 |
| ngRNA | 156 |
| ngRNA | 166 |
| ngRNA | 158 |
| ngRNA | 168 |
| ngRNA | 167 |
| ngRNA | 163 |
| ngRNA | 165 |
| ngRNA | 169 |
| ngRNA | 173 |
| ngRNA | 293 |
| ngRNA | 171 |
| ngRNA | 176 |
| ngRNA | 179 |
| ngRNA | 181 |
| ngRNA | 178 |
| ngRNA | 172 |
| ngRNA | 180 |
| ngRNA | 175 |
| ngRNA | 170 |
| ngRNA | 174 |
| ngRNA | 292 |
| ngRNA | 177 |

TABLE 9

| Sequence region | SEQ ID |
|---|---|
| pegRNA Spacer | 483 |
| PBS | 484 |
| PBS | 485 |
| PBS | 486 |
| PBS | 487 |
| PBS | 488 |
| PBS | 489 |
| PBS | 490 |
| PBS | 491 |
| PBS | 492 |
| PBS | 493 |
| PBS | 494 |
| RTT | 495 |
| RTT | 496 |
| RTT | 497 |
| RTT | 498 |
| RTT | 499 |
| RTT | 500 |
| RTT | 501 |
| RTT | 502 |
| RTT | 503 |
| RTT | 504 |
| RTT | 505 |
| RTT | 506 |
| RTT | 507 |
| RTT | 508 |
| RTT | 509 |
| RTT | 510 |
| RTT | 511 |
| RTT | 512 |
| RTT | 513 |
| RTT | 514 |
| RTT | 515 |
| RTT | 516 |
| RTT | 517 |
| RTT | 518 |
| RTT | 519 |
| RTT | 520 |
| RTT | 521 |
| RTT | 522 |
| RTT | 523 |
| RTT | 524 |
| RTT | 525 |
| RTT | 526 |
| RTT | 527 |
| RTT | 528 |
| ngRNA Spacer | 68 |
| ngRNA Spacer | 66 |
| ngRNA Spacer | 61 |
| ngRNA Spacer | 71 |
| ngRNA Spacer | 67 |
| ngRNA Spacer | 46 |
| ngRNA Spacer | 38 |
| ngRNA Spacer | 58 |
| ngRNA Spacer | 36 |
| ngRNA Spacer | 30 |
| ngRNA Spacer | 37 |
| ngRNA Spacer | 29 |
| ngRNA Spacer | 203 |
| ngRNA Spacer | 54 |
| ngRNA Spacer | 59 |
| ngRNA Spacer | 24 |
| ngRNA Spacer | 31 |
| ngRNA Spacer | 53 |
| ngRNA Spacer | 23 |
| ngRNA Spacer | 72 |
| ngRNA Spacer | 44 |
| ngRNA Spacer | 20 |
| ngRNA Spacer | 26 |
| ngRNA Spacer | 22 |
| ngRNA Spacer | 40 |
| ngRNA Spacer | 21 |
| ngRNA Spacer | 60 |
| ngRNA Spacer | 62 |
| ngRNA Spacer | 63 |
| ngRNA Spacer | 19 |
| ngRNA Spacer | 65 |
| ngRNA Spacer | 42 |
| ngRNA Spacer | 64 |
| ngRNA Spacer | 28 |
| ngRNA Spacer | 25 |
| ngRNA Spacer | 18 |
| ngRNA Spacer | 32 |
| ngRNA Spacer | 34 |
| ngRNA Spacer | 50 |
| ngRNA Spacer | 33 |
| ngRNA Spacer | 48 |
| ngRNA Spacer | 39 |
| ngRNA Spacer | 27 |
| ngRNA Spacer | 41 |
| ngRNA Spacer | 529 |
| ngRNA Spacer | 199 |
| ngRNA Spacer | 43 |
| ngRNA Spacer | 70 |
| ngRNA Spacer | 45 |
| ngRNA Spacer | 35 |
| ngRNA Spacer | 200 |
| ngRNA Spacer | 52 |
| ngRNA Spacer | 56 |
| ngRNA Spacer | 55 |
| ngRNA Spacer | 51 |
| ngRNA Spacer | 57 |
| ngRNA Spacer | 49 |
| ngRNA Spacer | 47 |
| ngRNA Spacer | 69 |
| pegRNA | 530 |
| pegRNA | 531 |
| pegRNA | 532 |
| pegRNA | 533 |
| pegRNA | 534 |
| pegRNA | 535 |
| pegRNA | 536 |
| pegRNA | 537 |
| pegRNA | 538 |
| pegRNA | 539 |
| pegRNA | 540 |
| pegRNA | 541 |
| pegRNA | 542 |
| pegRNA | 543 |
| pegRNA | 544 |
| pegRNA | 545 |
| pegRNA | 546 |
| pegRNA | 547 |
| pegRNA | 545 |
| pegRNA | 548 |
| pegRNA | 549 |
| pegRNA | 550 |
| pegRNA | 551 |
| pegRNA | 552 |
| pegRNA | 553 |
| pegRNA | 554 |
| pegRNA | 555 |
| pegRNA | 556 |
| pegRNA | 557 |
| pegRNA | 558 |
| pegRNA | 553 |
| pegRNA | 559 |
| pegRNA | 560 |
| pegRNA | 561 |
| pegRNA | 562 |
| pegRNA | 563 |
| pegRNA | 564 |
| pegRNA | 564 |
| pegRNA | 565 |
| pegRNA | 566 |
| pegRNA | 567 |
| pegRNA | 568 |
| pegRNA | 569 |
| pegRNA | 570 |
| pegRNA | 571 |
| pegRNA | 572 |
| pegRNA | 573 |
| pegRNA | 574 |
| pegRNA | 575 |
| pegRNA | 576 |
| pegRNA | 577 |
| pegRNA | 578 |
| pegRNA | 579 |
| pegRNA | 580 |
| pegRNA | 581 |
| pegRNA | 582 |
| pegRNA | 578 |
| pegRNA | 583 |
| pegRNA | 584 |
| pegRNA | 585 |
| pegRNA | 586 |
| pegRNA | 587 |
| pegRNA | 588 |
| pegRNA | 589 |
| pegRNA | 590 |
| pegRNA | 591 |
| pegRNA | 592 |
| pegRNA | 593 |
| pegRNA | 594 |
| pegRNA | 595 |
| pegRNA | 596 |
| pegRNA | 597 |
| pegRNA | 598 |
| pegRNA | 599 |
| pegRNA | 600 |
| pegRNA | 601 |
| pegRNA | 602 |
| pegRNA | 603 |
| pegRNA | 604 |
| pegRNA | 605 |
| pegRNA | 606 |
| pegRNA | 607 |
| pegRNA | 608 |
| pegRNA | 609 |
| pegRNA | 610 |
| pegRNA | 611 |
| pegRNA | 612 |
| pegRNA | 613 |
| pegRNA | 614 |
| pegRNA | 615 |
| pegRNA | 616 |
| pegRNA | 617 |
| pegRNA | 618 |
| pegRNA | 619 |
| pegRNA | 620 |
| pegRNA | 621 |
| pegRNA | 622 |
| pegRNA | 623 |
| pegRNA | 624 |
| pegRNA | 625 |
| pegRNA | 626 |
| pegRNA | 627 |
| pegRNA | 628 |
| pegRNA | 629 |
| pegRNA | 630 |
| pegRNA | 631 |
| pegRNA | 632 |
| pegRNA | 633 |
| pegRNA | 634 |
| pegRNA | 635 |
| pegRNA | 636 |
| pegRNA | 637 |
| pegRNA | 638 |
| pegRNA | 639 |
| pegRNA | 640 |
| pegRNA | 641 |
| pegRNA | 642 |
| pegRNA | 643 |
| pegRNA | 644 |
| pegRNA | 645 |
| pegRNA | 646 |
| pegRNA | 647 |
| pegRNA | 648 |
| pegRNA | 649 |
| pegRNA | 650 |
| pegRNA | 651 |
| pegRNA | 652 |
| pegRNA | 653 |
| pegRNA | 654 |
| pegRNA | 655 |
| pegRNA | 656 |
| pegRNA | 657 |
| pegRNA | 658 |
| pegRNA | 659 |
| pegRNA | 660 |
| pegRNA | 661 |
| pegRNA | 662 |
| pegRNA | 663 |
| pegRNA | 664 |
| pegRNA | 665 |
| pegRNA | 666 |
| pegRNA | 667 |
| pegRNA | 668 |
| pegRNA | 669 |
| pegRNA | 670 |
| pegRNA | 671 |
| pegRNA | 672 |
| pegRNA | 673 |
| pegRNA | 674 |
| pegRNA | 675 |
| pegRNA | 676 |
| pegRNA | 677 |
| pegRNA | 678 |
| pegRNA | 679 |
| pegRNA | 680 |
| ngRNA | 161 |
| ngRNA | 154 |
| ngRNA | 166 |
| ngRNA | 155 |
| ngRNA | 162 |
| ngRNA | 159 |
| ngRNA | 168 |
| ngRNA | 157 |
| ngRNA | 160 |
| ngRNA | 291 |
| ngRNA | 169 |
| ngRNA | 153 |
| ngRNA | 290 |
| ngRNA | 167 |
| ngRNA | 165 |
| ngRNA | 158 |
| ngRNA | 681 |
| ngRNA | 156 |
| ngRNA | 163 |
| ngRNA | 164 |
| ngRNA | 293 |
| ngRNA | 180 |
| ngRNA | 173 |
| ngRNA | 176 |
| ngRNA | 181 |
| ngRNA | 178 |
| ngRNA | 292 |
| ngRNA | 175 |
| ngRNA | 177 |
| ngRNA | 172 |
| ngRNA | 171 |
| ngRNA | 170 |
| ngRNA | 174 |
| ngRNA | 179 |

TABLE 10

| Sequence region | SEQ ID |
|---|---|
| pegRNA Spacer | 682 |
| PBS | 683 |
| PBS | 684 |
| PBS | 685 |
| PBS | 686 |
| PBS | 687 |
| PBS | 688 |
| PBS | 689 |
| PBS | 690 |
| PBS | 691 |
| PBS | 692 |
| PBS | 693 |
| RTT | 694 |
| RTT | 695 |
| RTT | 696 |
| RTT | 697 |
| RTT | 698 |
| RTT | 699 |
| RTT | 700 |
| RTT | 701 |
| RTT | 702 |
| RTT | 703 |
| RTT | 704 |
| RTT | 705 |
| RTT | 706 |
| RTT | 707 |
| RTT | 708 |
| RTT | 709 |
| RTT | 710 |
| RTT | 711 |
| RTT | 712 |
| RTT | 713 |
| RTT | 714 |
| RTT | 715 |
| RTT | 716 |
| RTT | 717 |
| RTT | 718 |
| RTT | 719 |
| RTT | 720 |
| RTT | 721 |
| RTT | 722 |
| RTT | 723 |
| RTT | 724 |
| RTT | 725 |
| RTT | 726 |
| RTT | 727 |
| RTT | 728 |
| RTT | 729 |
| RTT | 730 |
| RTT | 731 |
| RTT | 732 |
| RTT | 733 |
| RTT | 734 |
| RTT | 735 |
| ngRNA Spacer | 67 |
| ngRNA Spacer | 72 |
| ngRNA Spacer | 34 |
| ngRNA Spacer | 50 |
| ngRNA Spacer | 27 |
| ngRNA Spacer | 36 |
| ngRNA Spacer | 31 |
| ngRNA Spacer | 53 |
| ngRNA Spacer | 57 |
| ngRNA Spacer | 22 |
| ngRNA Spacer | 49 |
| ngRNA Spacer | 43 |
| ngRNA Spacer | 54 |
| ngRNA Spacer | 59 |
| ngRNA Spacer | 56 |
| ngRNA Spacer | 70 |
| ngRNA Spacer | 55 |
| ngRNA Spacer | 44 |
| ngRNA Spacer | 30 |
| ngRNA Spacer | 200 |
| ngRNA Spacer | 203 |
| ngRNA Spacer | 52 |
| ngRNA Spacer | 41 |
| ngRNA Spacer | 51 |
| ngRNA Spacer | 736 |
| ngRNA Spacer | 737 |
| ngRNA Spacer | 32 |
| ngRNA Spacer | 738 |
| ngRNA Spacer | 45 |
| ngRNA Spacer | 60 |
| ngRNA Spacer | 199 |
| ngRNA Spacer | 37 |
| ngRNA Spacer | 18 |
| ngRNA Spacer | 23 |
| ngRNA Spacer | 42 |
| ngRNA Spacer | 21 |
| ngRNA Spacer | 38 |
| ngRNA Spacer | 58 |
| ngRNA Spacer | 33 |
| ngRNA Spacer | 68 |
| ngRNA Spacer | 47 |
| ngRNA Spacer | 40 |
| ngRNA Spacer | 529 |
| ngRNA Spacer | 739 |
| ngRNA Spacer | 46 |
| ngRNA Spacer | 19 |
| ngRNA Spacer | 20 |
| ngRNA Spacer | 26 |
| ngRNA Spacer | 48 |
| ngRNA Spacer | 24 |
| ngRNA Spacer | 35 |
| ngRNA Spacer | 28 |
| ngRNA Spacer | 61 |
| ngRNA Spacer | 66 |
| ngRNA Spacer | 71 |
| ngRNA Spacer | 63 |
| ngRNA Spacer | 64 |
| ngRNA Spacer | 62 |
| ngRNA Spacer | 69 |
| ngRNA Spacer | 740 |
| ngRNA Spacer | 39 |
| ngRNA Spacer | 29 |
| ngRNA Spacer | 25 |
| ngRNA Spacer | 65 |
| pegRNA | 741 |
| pegRNA | 742 |
| pegRNA | 743 |
| pegRNA | 744 |
| pegRNA | 745 |
| pegRNA | 746 |
| pegRNA | 747 |
| pegRNA | 748 |
| pegRNA | 749 |
| pegRNA | 750 |
| pegRNA | 751 |
| pegRNA | 752 |
| pegRNA | 753 |
| pegRNA | 754 |
| pegRNA | 755 |
| pegRNA | 756 |
| pegRNA | 757 |
| pegRNA | 758 |
| pegRNA | 760 |
| pegRNA | 761 |
| pegRNA | 762 |
| pegRNA | 763 |
| pegRNA | 764 |
| pegRNA | 765 |
| pegRNA | 766 |
| pegRNA | 767 |
| pegRNA | 768 |
| pegRNA | 769 |
| pegRNA | 770 |
| pegRNA | 771 |
| pegRNA | 772 |
| pegRNA | 773 |
| pegRNA | 774 |
| pegRNA | 775 |
| pegRNA | 776 |
| pegRNA | 777 |
| pegRNA | 778 |
| pegRNA | 779 |
| pegRNA | 780 |
| pegRNA | 781 |
| pegRNA | 782 |
| pegRNA | 783 |
| pegRNA | 784 |
| pegRNA | 785 |
| pegRNA | 786 |
| pegRNA | 787 |
| pegRNA | 788 |
| pegRNA | 789 |
| pegRNA | 790 |
| pegRNA | 791 |
| pegRNA | 792 |
| pegRNA | 793 |
| pegRNA | 794 |
| pegRNA | 795 |
| pegRNA | 796 |
| pegRNA | 797 |
| pegRNA | 798 |
| pegRNA | 799 |
| pegRNA | 800 |
| pegRNA | 801 |
| pegRNA | 802 |
| pegRNA | 803 |
| pegRNA | 804 |
| pegRNA | 806 |
| pegRNA | 807 |
| pegRNA | 808 |
| pegRNA | 809 |
| pegRNA | 810 |
| pegRNA | 811 |
| pegRNA | 812 |
| pegRNA | 813 |
| pegRNA | 814 |
| pegRNA | 815 |
| pegRNA | 816 |
| pegRNA | 817 |
| pegRNA | 818 |
| pegRNA | 819 |
| pegRNA | 820 |
| pegRNA | 821 |
| pegRNA | 822 |
| pegRNA | 823 |
| pegRNA | 824 |
| pegRNA | 825 |
| pegRNA | 826 |
| pegRNA | 827 |
| pegRNA | 828 |
| pegRNA | 829 |
| pegRNA | 830 |
| pegRNA | 831 |
| pegRNA | 832 |
| pegRNA | 833 |
| pegRNA | 834 |
| pegRNA | 835 |
| pegRNA | 836 |
| pegRNA | 837 |
| pegRNA | 838 |
| pegRNA | 839 |
| pegRNA | 840 |
| pegRNA | 841 |
| pegRNA | 842 |
| pegRNA | 843 |
| pegRNA | 844 |
| pegRNA | 845 |
| pegRNA | 846 |
| pegRNA | 847 |
| pegRNA | 848 |
| pegRNA | 849 |
| pegRNA | 850 |
| pegRNA | 851 |
| pegRNA | 852 |
| pegRNA | 853 |
| pegRNA | 854 |
| pegRNA | 855 |
| pegRNA | 856 |
| pegRNA | 857 |
| pegRNA | 858 |
| pegRNA | 859 |
| pegRNA | 860 |
| pegRNA | 861 |
| pegRNA | 862 |
| pegRNA | 863 |
| pegRNA | 864 |
| pegRNA | 865 |
| pegRNA | 866 |
| pegRNA | 867 |
| pegRNA | 868 |
| pegRNA | 869 |
| pegRNA | 870 |
| pegRNA | 871 |
| pegRNA | 872 |
| pegRNA | 873 |
| pegRNA | 874 |
| pegRNA | 875 |
| pegRNA | 876 |
| pegRNA | 877 |
| pegRNA | 878 |
| pegRNA | 879 |
| pegRNA | 880 |
| pegRNA | 881 |
| pegRNA | 882 |
| pegRNA | 883 |
| pegRNA | 884 |
| pegRNA | 885 |
| pegRNA | 886 |
| pegRNA | 887 |
| pegRNA | 888 |
| pegRNA | 889 |
| pegRNA | 890 |
| pegRNA | 891 |
| pegRNA | 892 |
| pegRNA | 893 |
| pegRNA | 894 |
| pegRNA | 895 |
| pegRNA | 896 |
| pegRNA | 897 |
| pegRNA | 898 |
| pegRNA | 899 |
| pegRNA | 900 |
| pegRNA | 901 |
| pegRNA | 902 |
| pegRNA | 903 |
| pegRNA | 904 |
| pegRNA | 905 |
| pegRNA | 906 |
| pegRNA | 907 |
| pegRNA | 908 |
| pegRNA | 909 |
| pegRNA | 910 |
| pegRNA | 911 |
| pegRNA | 912 |
| pegRNA | 913 |
| pegRNA | 914 |
| pegRNA | 915 |
| pegRNA | 916 |
| pegRNA | 917 |
| pegRNA | 918 |
| pegRNA | 919 |
| pegRNA | 920 |
| pegRNA | 921 |
| pegRNA | 922 |
| pegRNA | 923 |
| pegRNA | 924 |
| pegRNA | 925 |
| pegRNA | 926 |
| pegRNA | 927 |
| pegRNA | 928 |
| pegRNA | 929 |
| pegRNA | 930 |
| pegRNA | 931 |
| pegRNA | 932 |
| pegRNA | 933 |
| pegRNA | 934 |
| pegRNA | 935 |
| pegRNA | 936 |
| pegRNA | 937 |
| pegRNA | 938 |
| pegRNA | 939 |
| pegRNA | 940 |
| pegRNA | 941 |
| pegRNA | 942 |
| pegRNA | 943 |
| pegRNA | 944 |
| pegRNA | 945 |
| pegRNA | 946 |
| pegRNA | 947 |
| pegRNA | 948 |
| pegRNA | 949 |
| pegRNA | 950 |
| pegRNA | 951 |
| pegRNA | 952 |
| pegRNA | 953 |
| pegRNA | 954 |
| pegRNA | 955 |
| pegRNA | 956 |
| pegRNA | 957 |
| pegRNA | 958 |
| pegRNA | 959 |
| pegRNA | 960 |
| pegRNA | 961 |
| pegRNA | 962 |
| pegRNA | 963 |
| pegRNA | 964 |
| pegRNA | 965 |
| pegRNA | 966 |
| pegRNA | 967 |
| pegRNA | 968 |
| pegRNA | 969 |
| pegRNA | 970 |
| pegRNA | 971 |
| pegRNA | 972 |
| pegRNA | 973 |
| pegRNA | 974 |
| pegRNA | 975 |
| pegRNA | 976 |
| pegRNA | 977 |
| pegRNA | 978 |
| pegRNA | 979 |
| pegRNA | 980 |
| pegRNA | 981 |
| pegRNA | 982 |
| pegRNA | 983 |
| pegRNA | 984 |
| pegRNA | 985 |
| pegRNA | 986 |
| pegRNA | 987 |
| pegRNA | 988 |
| pegRNA | 989 |
| pegRNA | 990 |
| pegRNA | 991 |
| pegRNA | 992 |
| pegRNA | 993 |
| pegRNA | 994 |
| pegRNA | 995 |
| pegRNA | 996 |
| pegRNA | 997 |
| pegRNA | 998 |
| pegRNA | 999 |
| pegRNA | 1000 |
| pegRNA | 1001 |
| pegRNA | 1002 |
| pegRNA | 1003 |
| pegRNA | 1004 |
| pegRNA | 1005 |
| pegRNA | 1006 |
| pegRNA | 1007 |
| pegRNA | 1008 |
| pegRNA | 1009 |
| pegRNA | 1010 |
| pegRNA | 1011 |
| pegRNA | 1012 |
| pegRNA | 1013 |
| pegRNA | 1014 |
| pegRNA | 1015 |
| pegRNA | 1016 |
| pegRNA | 1017 |
| pegRNA | 1018 |
| pegRNA | 1019 |
| pegRNA | 1020 |
| pegRNA | 1021 |
| pegRNA | 1022 |
| pegRNA | 1023 |
| pegRNA | 1024 |
| pegRNA | 1025 |
| pegRNA | 1026 |
| pegRNA | 1027 |
| pegRNA | 1028 |
| pegRNA | 1029 |
| pegRNA | 1030 |
| pegRNA | 1031 |
| pegRNA | 1032 |
| pegRNA | 1033 |
| pegRNA | 1034 |
| pegRNA | 1035 |
| pegRNA | 1036 |
| pegRNA | 1037 |
| pegRNA | 1038 |
| pegRNA | 1039 |
| pegRNA | 1040 |
| pegRNA | 1041 |
| pegRNA | 1042 |
| pegRNA | 1043 |
| pegRNA | 1044 |
| pegRNA | 1045 |
| pegRNA | 1046 |
| pegRNA | 1047 |
| pegRNA | 1048 |
| pegRNA | 1049 |
| pegRNA | 1050 |
| pegRNA | 1051 |
| pegRNA | 1052 |
| pegRNA | 1053 |
| pegRNA | 1054 |
| pegRNA | 1055 |
| pegRNA | 1056 |
| pegRNA | 1057 |
| pegRNA | 1058 |
| pegRNA | 1059 |
| pegRNA | 1060 |
| pegRNA | 1061 |
| pegRNA | 1062 |
| pegRNA | 1063 |
| pegRNA | 1064 |
| pegRNA | 1065 |
| pegRNA | 1066 |
| pegRNA | 1067 |
| pegRNA | 1068 |
| pegRNA | 1069 |
| pegRNA | 1070 |
| pegRNA | 1071 |
| pegRNA | 1072 |
| pegRNA | 1073 |
| pegRNA | 1074 |
| pegRNA | 1075 |
| pegRNA | 1076 |
| pegRNA | 1077 |
| pegRNA | 1078 |
| pegRNA | 1079 |
| pegRNA | 1080 |
| pegRNA | 1081 |
| pegRNA | 1082 |
| pegRNA | 1083 |
| pegRNA | 1084 |
| pegRNA | 1085 |
| pegRNA | 1086 |
| pegRNA | 1087 |
| pegRNA | 1088 |
| pegRNA | 1089 |
| pegRNA | 1090 |
| pegRNA | 1091 |
| pegRNA | 1092 |
| pegRNA | 1093 |
| pegRNA | 1094 |
| pegRNA | 1095 |
| pegRNA | 1096 |
| pegRNA | 1097 |
| pegRNA | 1098 |
| pegRNA | 1099 |
| pegRNA | 1100 |
| pegRNA | 1101 |
| pegRNA | 1102 |
| pegRNA | 1103 |
| pegRNA | 1104 |
| pegRNA | 1105 |
| pegRNA | 1106 |
| pegRNA | 1107 |
| pegRNA | 1108 |
| pegRNA | 1109 |
| pegRNA | 1110 |
| pegRNA | 1111 |
| pegRNA | 1112 |
| pegRNA | 1113 |
| pegRNA | 1114 |
| pegRNA | 1115 |
| pegRNA | 1116 |
| pegRNA | 1117 |
| pegRNA | 1118 |
| pegRNA | 1119 |
| pegRNA | 1120 |
| pegRNA | 1121 |
| pegRNA | 1122 |
| pegRNA | 1123 |
| pegRNA | 1124 |
| pegRNA | 1125 |
| pegRNA | 1126 |
| pegRNA | 1127 |
| pegRNA | 1128 |
| pegRNA | 1129 |
| pegRNA | 1130 |
| pegRNA | 1131 |
| pegRNA | 1132 |
| pegRNA | 1133 |
| pegRNA | 1134 |
| pegRNA | 1135 |
| pegRNA | 1136 |
| pegRNA | 1137 |
| pegRNA | 1138 |
| pegRNA | 1139 |
| pegRNA | 1140 |
| pegRNA | 1141 |
| pegRNA | 1142 |
| pegRNA | 1143 |
| pegRNA | 1144 |
| pegRNA | 1145 |
| pegRNA | 1146 |
| pegRNA | 1147 |
| pegRNA | 1148 |
| pegRNA | 1149 |
| pegRNA | 1150 |
| pegRNA | 1151 |
| pegRNA | 1152 |
| pegRNA | 1153 |
| pegRNA | 1154 |
| pegRNA | 1155 |
| pegRNA | 1156 |
| pegRNA | 1157 |
| pegRNA | 1158 |
| pegRNA | 1159 |
| pegRNA | 1160 |
| pegRNA | 1161 |
| pegRNA | 1162 |
| pegRNA | 1163 |
| pegRNA | 1164 |
| pegRNA | 1165 |
| pegRNA | 1166 |
| pegRNA | 1167 |
| pegRNA | 1168 |
| pegRNA | 1169 |
| pegRNA | 1170 |
| pegRNA | 1171 |
| pegRNA | 1172 |
| pegRNA | 1173 |
| pegRNA | 1174 |
| pegRNA | 1175 |
| pegRNA | 1176 |
| pegRNA | 1177 |
| pegRNA | 1178 |
| pegRNA | 1179 |
| pegRNA | 1180 |
| pegRNA | 1181 |
| pegRNA | 1182 |
| pegRNA | 1183 |
| pegRNA | 1184 |
| pegRNA | 1185 |
| pegRNA | 1186 |
| pegRNA | 1187 |
| pegRNA | 1188 |
| pegRNA | 1189 |
| pegRNA | 1190 |
| pegRNA | 1191 |
| pegRNA | 1192 |
| pegRNA | 1193 |
| pegRNA | 1194 |
| pegRNA | 1195 |
| pegRNA | 1196 |
| pegRNA | 1197 |
| pegRNA | 1198 |
| pegRNA | 1199 |
| pegRNA | 1200 |
| pegRNA | 1201 |
| pegRNA | 1202 |
| pegRNA | 1203 |
| pegRNA | 1204 |
| pegRNA | 1205 |
| pegRNA | 1206 |
| pegRNA | 1207 |
| pegRNA | 1208 |
| pegRNA | 1209 |
| pegRNA | 1210 |
| pegRNA | 1211 |
| pegRNA | 1212 |
| pegRNA | 1213 |
| pegRNA | 1214 |
| pegRNA | 1215 |
| pegRNA | 1216 |
| pegRNA | 1217 |
| pegRNA | 1218 |
| pegRNA | 1219 |
| pegRNA | 1220 |
| pegRNA | 1221 |
| pegRNA | 1222 |
| pegRNA | 1223 |
| pegRNA | 1224 |
| pegRNA | 1225 |
| pegRNA | 1226 |
| pegRNA | 1227 |
| pegRNA | 1228 |
| pegRNA | 1229 |
| pegRNA | 1230 |
| pegRNA | 1231 |
| pegRNA | 1232 |
| pegRNA | 1233 |
| pegRNA | 1234 |
| pegRNA | 1235 |
| pegRNA | 1236 |
| pegRNA | 1237 |
| pegRNA | 1238 |
| pegRNA | 1239 |
| pegRNA | 1240 |
| pegRNA | 1241 |
| pegRNA | 1242 |
| pegRNA | 1243 |
| pegRNA | 1244 |
| pegRNA | 1245 |
| pegRNA | 1246 |
| pegRNA | 1247 |
| pegRNA | 1248 |
| pegRNA | 1249 |
| pegRNA | 1250 |
| pegRNA | 1251 |
| pegRNA | 1252 |
| pegRNA | 1253 |
| pegRNA | 1254 |
| pegRNA | 1255 |
| pegRNA | 1256 |
| pegRNA | 1257 |
| pegRNA | 1258 |
| pegRNA | 1259 |
| pegRNA | 1260 |
| pegRNA | 1261 |
| pegRNA | 1262 |
| pegRNA | 1263 |
| pegRNA | 1264 |
| pegRNA | 1265 |
| pegRNA | 1266 |
| pegRNA | 1267 |
| pegRNA | 1268 |
| pegRNA | 1269 |
| pegRNA | 1270 |
| pegRNA | 1271 |
| pegRNA | 1272 |
| pegRNA | 1273 |
| pegRNA | 1274 |
| pegRNA | 1275 |
| pegRNA | 1276 |
| pegRNA | 1277 |
| pegRNA | 1278 |
| pegRNA | 1279 |
| pegRNA | 1280 |
| pegRNA | 1281 |
| pegRNA | 1282 |
| pegRNA | 1283 |
| pegRNA | 1284 |
| pegRNA | 1285 |
| pegRNA | 1286 |
| pegRNA | 1287 |
| pegRNA | 1288 |
| pegRNA | 1289 |
| pegRNA | 1290 |
| pegRNA | 1291 |
| pegRNA | 1292 |
| pegRNA | 1293 |
| pegRNA | 1294 |
| pegRNA | 1295 |
| pegRNA | 1296 |
| pegRNA | 1297 |
| pegRNA | 1298 |
| pegRNA | 1299 |
| pegRNA | 1300 |
| pegRNA | 1301 |
| pegRNA | 1302 |
| pegRNA | 1303 |
| pegRNA | 1304 |
| pegRNA | 1305 |
| pegRNA | 1306 |
| pegRNA | 1307 |
| pegRNA | 1308 |
| pegRNA | 1309 |
| pegRNA | 1310 |
| pegRNA | 1311 |
| pegRNA | 1312 |
| pegRNA | 1313 |
| pegRNA | 1314 |
| pegRNA | 1315 |
| pegRNA | 1316 |
| pegRNA | 1317 |
| pegRNA | 1318 |
| pegRNA | 1319 |
| pegRNA | 1320 |
| pegRNA | 1321 |
| pegRNA | 1322 |
| pegRNA | 1323 |
| pegRNA | 1324 |
| pegRNA | 1325 |
| pegRNA | 1326 |
| pegRNA | 1327 |
| pegRNA | 1328 |
| pegRNA | 1329 |
| pegRNA | 1330 |
| pegRNA | 1331 |
| pegRNA | 1332 |
| pegRNA | 1333 |
| pegRNA | 1334 |
| pegRNA | 1335 |
| pegRNA | 1336 |
| pegRNA | 1337 |
| pegRNA | 1338 |
| pegRNA | 1339 |
| pegRNA | 1340 |
| pegRNA | 1341 |
| pegRNA | 1342 |
| pegRNA | 1343 |
| pegRNA | 1344 |
| pegRNA | 1345 |
| pegRNA | 1346 |
| pegRNA | 1347 |
| pegRNA | 1348 |
| pegRNA | 1349 |
| pegRNA | 1350 |
| pegRNA | 1351 |
| pegRNA | 1352 |
| pegRNA | 1353 |
| pegRNA | 1354 |
| pegRNA | 1355 |
| pegRNA | 1356 |
| pegRNA | 1357 |
| pegRNA | 1358 |
| pegRNA | 1359 |
| pegRNA | 1360 |
| pegRNA | 1361 |
| pegRNA | 1362 |
| pegRNA | 1363 |
| pegRNA | 1364 |
| pegRNA | 1365 |
| pegRNA | 1366 |
| pegRNA | 1367 |
| pegRNA | 1368 |
| pegRNA | 1369 |
| pegRNA | 1370 |
| pegRNA | 1371 |
| pegRNA | 1372 |
| pegRNA | 1373 |
| pegRNA | 1374 |
| pegRNA | 1375 |
| pegRNA | 1376 |
| pegRNA | 1377 |
| pegRNA | 1378 |
| pegRNA | 1379 |
| pegRNA | 1380 |
| pegRNA | 1381 |
| pegRNA | 1382 |
| pegRNA | 1383 |
| pegRNA | 1384 |
| pegRNA | 1385 |
| pegRNA | 1386 |
| pegRNA | 1387 |
| pegRNA | 1388 |
| pegRNA | 1389 |
| pegRNA | 1390 |
| pegRNA | 1391 |
| pegRNA | 1392 |
| pegRNA | 1393 |
| pegRNA | 1394 |
| pegRNA | 1395 |
| pegRNA | 1396 |
| pegRNA | 1397 |
| pegRNA | 1398 |
| pegRNA | 1399 |
| pegRNA | 1400 |
| pegRNA | 1401 |
| pegRNA | 1402 |
| pegRNA | 1403 |
| pegRNA | 1404 |
| pegRNA | 1405 |
| pegRNA | 1406 |
| pegRNA | 1407 |
| pegRNA | 1408 |
| pegRNA | 1409 |
| pegRNA | 1410 |
| pegRNA | 1411 |
| pegRNA | 1412 |
| pegRNA | 1413 |
| pegRNA | 1414 |
| pegRNA | 1415 |
| pegRNA | 1416 |
| pegRNA | 1417 |
| pegRNA | 1418 |
| pegRNA | 1419 |
| pegRNA | 1420 |
| pegRNA | 1421 |
| pegRNA | 1422 |
| pegRNA | 1423 |
| pegRNA | 1424 |
| pegRNA | 1425 |
| pegRNA | 1426 |
| pegRNA | 1427 |
| pegRNA | 1428 |
| pegRNA | 1429 |
| pegRNA | 1430 |
| pegRNA | 1431 |
| pegRNA | 1432 |
| pegRNA | 1433 |
| pegRNA | 1434 |
| pegRNA | 1435 |
| pegRNA | 1436 |
| pegRNA | 1437 |
| pegRNA | 1438 |
| pegRNA | 1439 |
| pegRNA | 1440 |
| pegRNA | 1441 |
| pegRNA | 1442 |
| pegRNA | 1443 |
| pegRNA | 1444 |
| pegRNA | 1445 |
| pegRNA | 1446 |
| pegRNA | 1447 |
| pegRNA | 1448 |
| pegRNA | 1450 |
| pegRNA | 1451 |
| pegRNA | 1452 |
| pegRNA | 1453 |
| pegRNA | 1454 |
| pegRNA | 1455 |
| pegRNA | 1456 |
| pegRNA | 1457 |
| pegRNA | 1458 |
| pegRNA | 1459 |
| pegRNA | 1460 |
| pegRNA | 1461 |
| pegRNA | 1462 |
| pegRNA | 1463 |
| pegRNA | 1464 |
| pegRNA | 1465 |
| pegRNA | 1466 |
| pegRNA | 1467 |
| pegRNA | 1468 |
| pegRNA | 1469 |
| pegRNA | 1470 |
| pegRNA | 1471 |
| pegRNA | 1472 |
| pegRNA | 1473 |
| pegRNA | 1474 |
| pegRNA | 1475 |
| pegRNA | 1476 |
| pegRNA | 1477 |
| pegRNA | 1478 |
| pegRNA | 1479 |
| pegRNA | 1480 |
| pegRNA | 1481 |
| pegRNA | 1482 |
| pegRNA | 1483 |
| pegRNA | 1484 |
| pegRNA | 1485 |
| pegRNA | 1486 |
| pegRNA | 1487 |
| pegRNA | 1488 |
| pegRNA | 1489 |
| pegRNA | 1490 |
| pegRNA | 1491 |
| pegRNA | 1492 |
| pegRNA | 1493 |
| pegRNA | 1494 |
| pegRNA | 1495 |
| pegRNA | 1496 |
| pegRNA | 1497 |
| pegRNA | 1498 |
| pegRNA | 1499 |
| pegRNA | 1500 |
| ngRNA | 291 |
| ngRNA | 164 |
| ngRNA | 681 |
| ngRNA | 1501 |
| ngRNA | 166 |
| ngRNA | 158 |
| ngRNA | 161 |
| ngRNA | 157 |
| ngRNA | 154 |
| ngRNA | 153 |
| ngRNA | 167 |
| ngRNA | 168 |
| ngRNA | 169 |
| ngRNA | 155 |
| ngRNA | 1502 |
| ngRNA | 160 |
| ngRNA | 1503 |
| ngRNA | 156 |
| ngRNA | 159 |
| ngRNA | 162 |
| ngRNA | 165 |
| ngRNA | 163 |
| ngRNA | 290 |
| ngRNA | 1504 |
| ngRNA | 177 |
| ngRNA | 178 |
| ngRNA | 171 |
| ngRNA | 175 |
| ngRNA | 173 |
| ngRNA | 180 |
| ngRNA | 293 |
| ngRNA | 176 |
| ngRNA | 181 |
| ngRNA | 292 |
| ngRNA | 174 |
| ngRNA | 170 |
| ngRNA | 172 |
| ngRNA | 179 |

TABLE 11

| Sequence region | SEQ ID |
|---|---|
| pegRNA Spacer | 1505 |
| PBS | 1506 |
| PBS | 1507 |
| PBS | 1508 |
| PBS | 1509 |
| PBS | 1510 |
| PBS | 1511 |
| PBS | 1512 |
| PBS | 1513 |
| PBS | 1514 |
| PBS | 1515 |
| PBS | 1516 |
| RTT | 1517 |
| RTT | 1518 |
| RTT | 1519 |
| RTT | 1520 |
| RTT | 1521 |
| RTT | 1522 |
| RTT | 1523 |
| RTT | 1524 |
| RTT | 1525 |
| RTT | 1526 |
| RTT | 1527 |
| RTT | 1528 |
| RTT | 1529 |
| RTT | 1530 |
| RTT | 1531 |
| RTT | 1532 |
| RTT | 1533 |
| RTT | 1534 |
| RTT | 1535 |
| RTT | 1536 |
| RTT | 1537 |
| RTT | 1538 |
| RTT | 1539 |
| RTT | 1540 |
| RTT | 1541 |
| RTT | 1542 |
| RTT | 1543 |
| RTT | 1544 |
| RTT | 1545 |
| RTT | 1546 |
| ngRNA Spacer | 65 |
| ngRNA Spacer | 63 |
| ngRNA Spacer | 62 |
| ngRNA Spacer | 66 |
| ngRNA Spacer | 61 |
| ngRNA Spacer | 71 |
| ngRNA Spacer | 53 |
| ngRNA Spacer | 37 |
| ngRNA Spacer | 44 |
| ngRNA Spacer | 529 |
| ngRNA Spacer | 42 |
| ngRNA Spacer | 58 |
| ngRNA Spacer | 50 |
| ngRNA Spacer | 31 |
| ngRNA Spacer | 19 |
| ngRNA Spacer | 737 |
| ngRNA Spacer | 738 |
| ngRNA Spacer | 36 |
| ngRNA Spacer | 739 |
| ngRNA Spacer | 34 |
| ngRNA Spacer | 203 |
| ngRNA Spacer | 49 |
| ngRNA Spacer | 54 |
| ngRNA Spacer | 52 |
| ngRNA Spacer | 18 |
| ngRNA Spacer | 43 |
| ngRNA Spacer | 57 |
| ngRNA Spacer | 56 |
| ngRNA Spacer | 64 |
| ngRNA Spacer | 24 |
| ngRNA Spacer | 23 |
| ngRNA Spacer | 72 |
| ngRNA Spacer | 51 |
| ngRNA Spacer | 70 |
| ngRNA Spacer | 48 |
| ngRNA Spacer | 60 |
| ngRNA Spacer | 21 |
| ngRNA Spacer | 20 |
| ngRNA Spacer | 25 |
| ngRNA Spacer | 40 |
| ngRNA Spacer | 22 |
| ngRNA Spacer | 38 |
| ngRNA Spacer | 59 |
| ngRNA Spacer | 39 |
| ngRNA Spacer | 46 |
| ngRNA Spacer | 26 |
| ngRNA Spacer | 29 |
| ngRNA Spacer | 67 |
| ngRNA Spacer | 28 |
| ngRNA Spacer | 69 |
| ngRNA Spacer | 30 |
| ngRNA Spacer | 41 |
| ngRNA Spacer | 740 |
| ngRNA Spacer | 68 |
| ngRNA Spacer | 32 |
| ngRNA Spacer | 35 |
| ngRNA Spacer | 736 |
| ngRNA Spacer | 47 |
| ngRNA Spacer | 199 |
| ngRNA Spacer | 33 |
| ngRNA Spacer | 55 |
| ngRNA Spacer | 45 |
| ngRNA Spacer | 27 |
| ngRNA Spacer | 200 |
| pegRNA | 1547 |
| pegRNA | 1548 |
| pegRNA | 1549 |
| pegRNA | 1550 |
| pegRNA | 1551 |
| pegRNA | 1552 |
| pegRNA | 1553 |
| pegRNA | 1554 |
| pegRNA | 1555 |
| pegRNA | 1556 |
| pegRNA | 1557 |
| pegRNA | 1558 |
| pegRNA | 1559 |
| pegRNA | 1560 |
| pegRNA | 1561 |
| pegRNA | 1562 |
| pegRNA | 1563 |
| pegRNA | 1564 |
| pegRNA | 1565 |
| pegRNA | 1566 |
| pegRNA | 1567 |
| pegRNA | 1568 |
| pegRNA | 1569 |
| pegRNA | 1570 |
| pegRNA | 1571 |
| pegRNA | 1572 |
| pegRNA | 1573 |
| pegRNA | 1574 |
| pegRNA | 1575 |
| pegRNA | 1576 |
| pegRNA | 1577 |
| pegRNA | 1578 |
| pegRNA | 1579 |
| pegRNA | 1580 |
| pegRNA | 1581 |
| pegRNA | 1582 |
| pegRNA | 1583 |
| pegRNA | 1584 |
| pegRNA | 1585 |
| pegRNA | 1586 |
| pegRNA | 1587 |
| pegRNA | 1588 |
| pegRNA | 1589 |
| pegRNA | 1590 |
| pegRNA | 1591 |
| pegRNA | 1592 |
| pegRNA | 1593 |
| pegRNA | 1594 |
| pegRNA | 1595 |
| pegRNA | 1596 |
| pegRNA | 1597 |
| pegRNA | 1598 |
| pegRNA | 1599 |
| pegRNA | 1600 |
| pegRNA | 1601 |
| pegRNA | 1602 |
| pegRNA | 1603 |
| pegRNA | 1604 |
| pegRNA | 1605 |
| pegRNA | 1606 |
| pegRNA | 1607 |
| pegRNA | 1608 |
| pegRNA | 1609 |
| pegRNA | 1610 |
| pegRNA | 1611 |
| pegRNA | 1612 |
| pegRNA | 1613 |
| pegRNA | 1614 |
| pegRNA | 1615 |
| pegRNA | 1616 |
| pegRNA | 1617 |
| pegRNA | 1618 |
| pegRNA | 1619 |
| pegRNA | 1620 |
| pegRNA | 1621 |
| pegRNA | 1622 |
| pegRNA | 1623 |
| pegRNA | 1624 |
| pegRNA | 1625 |
| pegRNA | 1626 |
| pegRNA | 1627 |
| pegRNA | 1628 |
| pegRNA | 1629 |
| pegRNA | 1630 |
| pegRNA | 1631 |
| pegRNA | 1632 |
| pegRNA | 1633 |
| pegRNA | 1634 |
| pegRNA | 1635 |
| pegRNA | 1636 |
| pegRNA | 1637 |
| pegRNA | 1638 |
| pegRNA | 1639 |
| pegRNA | 1640 |
| pegRNA | 1641 |
| pegRNA | 1642 |
| pegRNA | 1643 |
| pegRNA | 1644 |
| pegRNA | 1645 |
| pegRNA | 1646 |
| pegRNA | 1647 |
| pegRNA | 1648 |
| pegRNA | 1649 |
| pegRNA | 1650 |
| pegRNA | 1651 |
| pegRNA | 1652 |
| pegRNA | 1653 |
| pegRNA | 1654 |
| pegRNA | 1655 |
| pegRNA | 1656 |
| pegRNA | 1657 |
| pegRNA | 1658 |
| pegRNA | 1659 |
| pegRNA | 1660 |
| pegRNA | 1661 |
| pegRNA | 1662 |
| pegRNA | 1663 |
| pegRNA | 1664 |
| pegRNA | 1665 |
| pegRNA | 1666 |
| pegRNA | 1667 |
| pegRNA | 1668 |
| pegRNA | 1669 |
| pegRNA | 1670 |
| pegRNA | 1671 |
| pegRNA | 1672 |
| pegRNA | 1673 |
| pegRNA | 1674 |
| pegRNA | 1675 |
| pegRNA | 1676 |
| pegRNA | 1677 |
| pegRNA | 1678 |
| pegRNA | 1679 |
| pegRNA | 1680 |
| pegRNA | 1681 |
| pegRNA | 1682 |
| pegRNA | 1683 |
| pegRNA | 1684 |
| pegRNA | 1685 |
| pegRNA | 1686 |
| pegRNA | 1687 |
| pegRNA | 1688 |
| pegRNA | 1689 |
| pegRNA | 1690 |
| pegRNA | 1691 |
| pegRNA | 1692 |
| pegRNA | 1693 |
| pegRNA | 1694 |
| pegRNA | 1695 |
| pegRNA | 1696 |
| pegRNA | 1697 |
| pegRNA | 1698 |
| pegRNA | 1699 |
| pegRNA | 1700 |
| pegRNA | 1701 |
| pegRNA | 1702 |
| pegRNA | 1703 |
| pegRNA | 1704 |
| pegRNA | 1705 |
| pegRNA | 1706 |
| pegRNA | 1707 |
| pegRNA | 1708 |
| pegRNA | 1709 |
| pegRNA | 1710 |
| pegRNA | 1711 |
| pegRNA | 1712 |
| pegRNA | 1713 |
| pegRNA | 1714 |
| pegRNA | 1715 |
| pegRNA | 1716 |
| pegRNA | 1717 |
| pegRNA | 1718 |
| pegRNA | 1719 |
| pegRNA | 1720 |
| pegRNA | 1721 |
| pegRNA | 1722 |
| pegRNA | 1723 |
| pegRNA | 1724 |
| pegRNA | 1725 |
| pegRNA | 1726 |
| pegRNA | 1727 |
| pegRNA | 1728 |
| pegRNA | 1729 |
| pegRNA | 1730 |
| pegRNA | 1731 |
| pegRNA | 1732 |
| pegRNA | 1733 |
| pegRNA | 1734 |
| pegRNA | 1735 |
| pegRNA | 1736 |
| pegRNA | 1737 |
| pegRNA | 1738 |
| pegRNA | 1739 |
| pegRNA | 1740 |
| pegRNA | 1741 |
| pegRNA | 1742 |
| pegRNA | 1743 |
| pegRNA | 1744 |
| pegRNA | 1745 |
| pegRNA | 1746 |
| pegRNA | 1747 |
| pegRNA | 1748 |
| pegRNA | 1749 |
| pegRNA | 1750 |
| pegRNA | 1751 |
| pegRNA | 1752 |
| pegRNA | 1753 |
| pegRNA | 1754 |
| pegRNA | 1755 |
| pegRNA | 1756 |
| pegRNA | 1757 |
| pegRNA | 1758 |
| pegRNA | 1759 |
| pegRNA | 1760 |
| pegRNA | 1761 |
| pegRNA | 1762 |
| pegRNA | 1763 |
| pegRNA | 1764 |
| pegRNA | 1765 |
| pegRNA | 1766 |
| pegRNA | 1767 |
| pegRNA | 1768 |
| pegRNA | 1769 |
| pegRNA | 1770 |
| pegRNA | 1771 |
| pegRNA | 1772 |
| pegRNA | 1773 |
| pegRNA | 1774 |
| pegRNA | 1775 |
| pegRNA | 1776 |
| pegRNA | 1777 |
| pegRNA | 1778 |
| pegRNA | 1779 |
| pegRNA | 1780 |
| pegRNA | 1781 |
| pegRNA | 1782 |
| pegRNA | 1783 |
| pegRNA | 1784 |
| pegRNA | 1785 |
| pegRNA | 1786 |
| pegRNA | 1787 |
| pegRNA | 1788 |
| pegRNA | 1789 |
| pegRNA | 1790 |
| pegRNA | 1791 |
| pegRNA | 1792 |
| pegRNA | 1793 |
| pegRNA | 1794 |
| pegRNA | 1795 |
| pegRNA | 1796 |
| pegRNA | 1797 |
| pegRNA | 1798 |
| pegRNA | 1799 |
| pegRNA | 1800 |
| pegRNA | 1801 |
| pegRNA | 1802 |
| pegRNA | 1803 |
| pegRNA | 1804 |
| pegRNA | 1805 |
| pegRNA | 1806 |
| pegRNA | 1807 |
| pegRNA | 1808 |
| pegRNA | 1809 |
| pegRNA | 1810 |
| pegRNA | 1811 |
| pegRNA | 1812 |
| pegRNA | 1813 |
| pegRNA | 1814 |
| pegRNA | 1815 |
| pegRNA | 1816 |
| pegRNA | 1817 |
| pegRNA | 1818 |
| pegRNA | 1819 |
| pegRNA | 1820 |
| pegRNA | 1821 |
| pegRNA | 1822 |
| pegRNA | 1823 |
| pegRNA | 1824 |
| pegRNA | 1825 |
| pegRNA | 1826 |
| pegRNA | 1827 |
| pegRNA | 1828 |
| pegRNA | 1829 |
| pegRNA | 1830 |
| pegRNA | 1831 |
| pegRNA | 1832 |
| pegRNA | 1833 |
| pegRNA | 1834 |
| pegRNA | 1835 |
| pegRNA | 1836 |
| pegRNA | 1837 |
| pegRNA | 1838 |
| pegRNA | 1839 |
| pegRNA | 1840 |
| pegRNA | 1841 |
| pegRNA | 1842 |
| pegRNA | 1843 |
| pegRNA | 1844 |
| pegRNA | 1845 |
| pegRNA | 1846 |
| pegRNA | 1847 |
| pegRNA | 1848 |
| pegRNA | 1849 |
| pegRNA | 1850 |
| pegRNA | 1851 |
| pegRNA | 1852 |
| pegRNA | 1853 |
| pegRNA | 1854 |
| pegRNA | 1855 |
| pegRNA | 1856 |
| pegRNA | 1857 |
| pegRNA | 1858 |
| pegRNA | 1859 |
| pegRNA | 1860 |
| pegRNA | 1861 |
| pegRNA | 1862 |
| pegRNA | 1863 |
| pegRNA | 1864 |
| pegRNA | 1865 |
| pegRNA | 1866 |
| pegRNA | 1867 |
| pegRNA | 1868 |
| pegRNA | 1869 |
| pegRNA | 1870 |
| pegRNA | 1871 |
| pegRNA | 1872 |
| pegRNA | 1873 |
| pegRNA | 1874 |
| pegRNA | 1875 |
| pegRNA | 1876 |
| pegRNA | 1877 |
| pegRNA | 1878 |
| pegRNA | 1879 |
| pegRNA | 1880 |
| pegRNA | 1881 |
| pegRNA | 1882 |
| pegRNA | 1883 |
| pegRNA | 1884 |
| pegRNA | 1885 |
| pegRNA | 1886 |
| pegRNA | 1887 |
| pegRNA | 1888 |
| pegRNA | 1889 |
| pegRNA | 1890 |
| pegRNA | 1891 |
| pegRNA | 1892 |
| pegRNA | 1893 |
| pegRNA | 1894 |
| pegRNA | 1895 |
| pegRNA | 1896 |
| pegRNA | 1897 |
| pegRNA | 1898 |
| pegRNA | 1899 |
| pegRNA | 1900 |
| pegRNA | 1901 |
| pegRNA | 1902 |
| pegRNA | 1903 |
| pegRNA | 1904 |
| pegRNA | 1905 |
| pegRNA | 1906 |
| pegRNA | 1907 |
| pegRNA | 1908 |
| pegRNA | 1909 |
| pegRNA | 1910 |
| pegRNA | 1911 |
| pegRNA | 1912 |
| pegRNA | 1913 |
| pegRNA | 1914 |
| pegRNA | 1915 |
| pegRNA | 1916 |
| pegRNA | 1917 |
| pegRNA | 1918 |
| pegRNA | 1919 |
| pegRNA | 1920 |
| pegRNA | 1921 |
| pegRNA | 1922 |
| pegRNA | 1923 |
| pegRNA | 1924 |
| pegRNA | 1925 |
| pegRNA | 1926 |
| pegRNA | 1927 |
| pegRNA | 1928 |
| pegRNA | 1929 |
| pegRNA | 1930 |
| pegRNA | 1931 |
| pegRNA | 1932 |
| pegRNA | 1933 |
| pegRNA | 1934 |
| pegRNA | 1935 |
| pegRNA | 1936 |
| pegRNA | 1937 |
| pegRNA | 1938 |
| pegRNA | 1939 |
| pegRNA | 1940 |
| pegRNA | 1941 |
| pegRNA | 1942 |
| pegRNA | 1943 |
| pegRNA | 1944 |
| pegRNA | 1945 |
| pegRNA | 1946 |
| pegRNA | 1947 |
| pegRNA | 1948 |
| pegRNA | 1949 |
| pegRNA | 1950 |
| pegRNA | 1951 |
| pegRNA | 1952 |
| pegRNA | 1953 |
| pegRNA | 1954 |
| pegRNA | 1955 |
| pegRNA | 1956 |
| pegRNA | 1957 |
| pegRNA | 1958 |
| pegRNA | 1959 |
| pegRNA | 1960 |
| pegRNA | 1961 |
| pegRNA | 1962 |
| pegRNA | 1963 |
| pegRNA | 1964 |
| pegRNA | 1965 |
| pegRNA | 1966 |
| pegRNA | 1967 |
| pegRNA | 1968 |
| pegRNA | 1969 |
| pegRNA | 1970 |
| pegRNA | 1971 |
| pegRNA | 1972 |
| pegRNA | 1973 |
| pegRNA | 1974 |
| pegRNA | 1975 |
| pegRNA | 1976 |
| pegRNA | 1977 |
| pegRNA | 1978 |
| pegRNA | 1979 |
| pegRNA | 1980 |
| pegRNA | 1981 |
| pegRNA | 1982 |
| pegRNA | 1983 |
| pegRNA | 1984 |
| pegRNA | 1985 |
| pegRNA | 1986 |
| pegRNA | 1987 |
| pegRNA | 1988 |
| pegRNA | 1989 |
| pegRNA | 1990 |
| pegRNA | 1991 |
| pegRNA | 1992 |
| pegRNA | 1993 |
| pegRNA | 1994 |
| pegRNA | 1995 |
| pegRNA | 1996 |
| pegRNA | 1997 |
| pegRNA | 1998 |
| pegRNA | 1999 |
| pegRNA | 2000 |
| pegRNA | 2001 |
| pegRNA | 2002 |
| pegRNA | 2003 |
| pegRNA | 2004 |
| pegRNA | 2005 |
| pegRNA | 2006 |
| pegRNA | 2007 |
| pegRNA | 2008 |
| pegRNA | 2009 |
| pegRNA | 2010 |
| pegRNA | 2011 |
| pegRNA | 2012 |
| pegRNA | 2013 |
| pegRNA | 2014 |
| pegRNA | 2015 |
| pegRNA | 2016 |
| pegRNA | 2017 |
| pegRNA | 2018 |
| pegRNA | 2019 |
| pegRNA | 2020 |
| pegRNA | 2021 |
| pegRNA | 2022 |
| ngRNA | 169 |
| ngRNA | 153 |
| ngRNA | 291 |
| ngRNA | 1503 |
| ngRNA | 159 |
| ngRNA | 155 |
| ngRNA | 1502 |
| ngRNA | 160 |
| ngRNA | 681 |
| ngRNA | 158 |
| ngRNA | 161 |
| ngRNA | 168 |
| ngRNA | 157 |
| ngRNA | 166 |
| ngRNA | 167 |
| ngRNA | 164 |
| ngRNA | 162 |
| ngRNA | 154 |
| ngRNA | 165 |
| ngRNA | 290 |
| ngRNA | 163 |
| ngRNA | 156 |
| ngRNA | 1501 |
| ngRNA | 181 |
| ngRNA | 173 |
| ngRNA | 170 |
| ngRNA | 175 |
| ngRNA | 172 |
| ngRNA | 176 |
| ngRNA | 292 |
| ngRNA | 171 |
| ngRNA | 180 |
| ngRNA | 177 |
| ngRNA | 1504 |
| ngRNA | 179 |
| ngRNA | 174 |
| ngRNA | 178 |
| ngRNA | 293 |

TABLE 12

| Sequence region | SEQ ID |
|---|---|
| pegRNA Spacer | 2023 |
| PBS | 2024 |
| PBS | 2025 |
| PBS | 2026 |
| PBS | 2027 |
| PBS | 2028 |
| PBS | 2029 |
| PBS | 2030 |
| PBS | 2031 |
| PBS | 2032 |
| PBS | 2033 |
| PBS | 2034 |
| RTT | 2035 |
| RTT | 2036 |
| RTT | 2037 |
| RTT | 2038 |
| RTT | 2039 |
| RTT | 2040 |
| RTT | 2041 |
| RTT | 2042 |
| RTT | 2043 |
| RTT | 2044 |
| ngRNA Spacer | 2045 |
| ngRNA Spacer | 2046 |
| ngRNA Spacer | 2047 |
| ngRNA Spacer | 2048 |
| ngRNA Spacer | 2049 |
| ngRNA Spacer | 2050 |
| ngRNA Spacer | 2051 |
| ngRNA Spacer | 2052 |
| ngRNA Spacer | 2053 |
| ngRNA Spacer | 2054 |
| ngRNA Spacer | 2055 |
| ngRNA Spacer | 2056 |
| ngRNA Spacer | 2057 |
| ngRNA Spacer | 2058 |
| ngRNA Spacer | 2059 |
| ngRNA Spacer | 2060 |
| ngRNA Spacer | 2061 |
| ngRNA Spacer | 2062 |
| ngRNA Spacer | 2063 |
| ngRNA Spacer | 2064 |
| ngRNA Spacer | 2065 |
| ngRNA Spacer | 2066 |
| ngRNA Spacer | 2067 |
| ngRNA Spacer | 2068 |
| ngRNA Spacer | 41 |
| ngRNA Spacer | 2069 |
| ngRNA Spacer | 2070 |
| ngRNA Spacer | 2071 |
| ngRNA Spacer | 2072 |
| ngRNA Spacer | 2073 |
| ngRNA Spacer | 2074 |
| ngRNA Spacer | 2075 |
| ngRNA Spacer | 2076 |
| ngRNA Spacer | 2077 |
| ngRNA Spacer | 2078 |
| ngRNA Spacer | 2079 |
| ngRNA Spacer | 2080 |
| ngRNA Spacer | 2081 |
| ngRNA Spacer | 2082 |
| ngRNA Spacer | 2083 |
| ngRNA Spacer | 2084 |
| ngRNA Spacer | 2085 |
| ngRNA Spacer | 2086 |
| ngRNA Spacer | 2087 |
| ngRNA Spacer | 2088 |
| ngRNA Spacer | 2089 |
| ngRNA Spacer | 2090 |
| ngRNA Spacer | 2091 |
| ngRNA Spacer | 2092 |
| ngRNA Spacer | 2093 |
| ngRNA Spacer | 2094 |
| ngRNA Spacer | 2095 |
| ngRNA Spacer | 60 |
| ngRNA Spacer | 69 |
| ngRNA Spacer | 2096 |
| ngRNA Spacer | 65 |
| ngRNA Spacer | 64 |
| ngRNA Spacer | 63 |
| ngRNA Spacer | 62 |
| ngRNA Spacer | 66 |
| ngRNA Spacer | 61 |
| ngRNA Spacer | 71 |
| pegRNA | 2097 |
| pegRNA | 2098 |
| pegRNA | 2099 |
| pegRNA | 2100 |
| pegRNA | 2101 |
| pegRNA | 2102 |
| pegRNA | 2103 |
| pegRNA | 2104 |
| pegRNA | 2105 |
| pegRNA | 2106 |
| pegRNA | 2107 |
| pegRNA | 2108 |
| pegRNA | 2109 |
| pegRNA | 2110 |
| pegRNA | 2111 |
| pegRNA | 2112 |
| pegRNA | 2113 |
| pegRNA | 2114 |
| pegRNA | 2115 |
| pegRNA | 2116 |
| pegRNA | 2117 |
| pegRNA | 2118 |
| pegRNA | 2119 |
| pegRNA | 2120 |
| pegRNA | 2121 |
| pegRNA | 2122 |
| pegRNA | 2123 |
| pegRNA | 2124 |
| pegRNA | 2125 |
| pegRNA | 2127 |
| pegRNA | 2128 |
| pegRNA | 2129 |
| pegRNA | 2130 |
| pegRNA | 2131 |
| pegRNA | 2132 |
| pegRNA | 2133 |
| pegRNA | 2134 |
| pegRNA | 2135 |
| pegRNA | 2136 |
| pegRNA | 2137 |
| pegRNA | 2138 |
| pegRNA | 2139 |
| pegRNA | 2140 |
| pegRNA | 2141 |
| pegRNA | 2142 |
| pegRNA | 2143 |
| pegRNA | 2144 |
| pegRNA | 2145 |
| pegRNA | 2146 |
| pegRNA | 2147 |
| pegRNA | 2148 |
| pegRNA | 2149 |
| pegRNA | 2150 |
| pegRNA | 2151 |
| pegRNA | 2152 |
| pegRNA | 2153 |
| pegRNA | 2154 |
| pegRNA | 2155 |
| pegRNA | 2156 |
| pegRNA | 2157 |
| pegRNA | 2158 |
| pegRNA | 2159 |
| pegRNA | 2160 |
| pegRNA | 2161 |
| pegRNA | 2162 |
| pegRNA | 2163 |
| pegRNA | 2164 |
| pegRNA | 2165 |
| pegRNA | 2166 |
| pegRNA | 2167 |
| pegRNA | 2168 |
| pegRNA | 2169 |
| pegRNA | 2170 |
| pegRNA | 2171 |
| pegRNA | 2173 |
| pegRNA | 2174 |
| pegRNA | 2175 |
| pegRNA | 2176 |
| pegRNA | 2177 |
| pegRNA | 2178 |
| pegRNA | 2179 |
| pegRNA | 2180 |
| pegRNA | 2181 |
| pegRNA | 2182 |
| pegRNA | 2183 |
| pegRNA | 2184 |
| pegRNA | 2185 |
| pegRNA | 2186 |
| pegRNA | 2187 |
| pegRNA | 2188 |
| pegRNA | 2189 |
| pegRNA | 2190 |
| pegRNA | 2191 |
| pegRNA | 2192 |
| pegRNA | 2193 |
| pegRNA | 2194 |
| pegRNA | 2195 |
| pegRNA | 2196 |
| pegRNA | 2197 |
| pegRNA | 2198 |
| pegRNA | 2199 |
| pegRNA | 2200 |
| pegRNA | 2201 |
| pegRNA | 2202 |
| pegRNA | 2203 |
| pegRNA | 2204 |
| pegRNA | 2205 |
| pegRNA | 2206 |
| pegRNA | 2207 |
| pegRNA | 2208 |
| pegRNA | 2209 |
| pegRNA | 2210 |
| pegRNA | 2211 |
| pegRNA | 2212 |
| pegRNA | 2213 |
| pegRNA | 2214 |
| pegRNA | 2215 |
| pegRNA | 2216 |
| pegRNA | 2217 |
| pegRNA | 2218 |
| pegRNA | 2219 |
| pegRNA | 2220 |
| pegRNA | 2221 |
| pegRNA | 2222 |
| pegRNA | 2223 |
| pegRNA | 2224 |
| pegRNA | 2225 |
| pegRNA | 2226 |
| pegRNA | 2227 |
| pegRNA | 2228 |
| pegRNA | 2229 |
| pegRNA | 2230 |
| pegRNA | 2231 |
| pegRNA | 2232 |
| pegRNA | 2233 |
| pegRNA | 2234 |
| pegRNA | 2235 |
| pegRNA | 2236 |
| pegRNA | 2237 |
| pegRNA | 2238 |
| pegRNA | 2239 |
| pegRNA | 2240 |
| pegRNA | 2241 |
| pegRNA | 2242 |
| pegRNA | 2243 |
| pegRNA | 2244 |
| pegRNA | 2245 |
| pegRNA | 2246 |
| pegRNA | 2247 |
| pegRNA | 2248 |
| pegRNA | 2249 |
| pegRNA | 2250 |
| pegRNA | 2251 |
| pegRNA | 2252 |
| pegRNA | 2253 |
| pegRNA | 2254 |
| pegRNA | 2255 |
| pegRNA | 2256 |
| ngRNA | 2257 |
| ngRNA | 2258 |
| ngRNA | 2259 |
| ngRNA | 2260 |
| ngRNA | 2261 |
| ngRNA | 2262 |
| ngRNA | 2263 |
| ngRNA | 2264 |
| ngRNA | 2265 |
| ngRNA | 2266 |
| ngRNA | 2267 |
| ngRNA | 2268 |
| ngRNA | 2269 |
| ngRNA | 2270 |
| ngRNA | 2271 |
| ngRNA | 2272 |
| ngRNA | 2273 |
| ngRNA | 2274 |
| ngRNA | 2275 |
| ngRNA | 2276 |
| ngRNA | 2277 |
| ngRNA | 2278 |
| ngRNA | 2279 |
| ngRNA | 2280 |
| ngRNA | 2281 |
| ngRNA | 2282 |
| ngRNA | 2283 |
| ngRNA | 2284 |
| ngRNA | 2285 |
| ngRNA | 2286 |
| ngRNA | 2287 |
| ngRNA | 2288 |
| ngRNA | 2289 |
| ngRNA | 2290 |
| ngRNA | 2291 |
| ngRNA | 2292 |

TABLE 15

| Sequence region | SEQ ID |
|---|---|
| pegRNA Spacer | 2293 |
| PBS | 2294 |
| PBS | 2295 |
| PBS | 2296 |
| PBS | 2297 |
| PBS | 2298 |
| PBS | 2299 |
| PBS | 2300 |
| PBS | 2301 |
| PBS | 2302 |
| PBS | 2303 |
| PBS | 2304 |
| RTT | 2305 |
| RTT | 2306 |
| RTT | 2353 |
| RTT | 2307 |
| RTT | 2308 |
| RTT | 2309 |
| RTT | 2310 |
| RTT | 2311 |
| RTT | 2312 |
| RTT | 2313 |
| RTT | 2314 |
| RTT | 2315 |
| RTT | 2316 |
| RTT | 2317 |
| RTT | 2318 |
| RTT | 2319 |
| RTT | 2320 |
| RTT | 2321 |
| RTT | 2322 |
| RTT | 2323 |
| RTT | 2324 |
| RTT | 2325 |
| RTT | 2326 |
| RTT | 2327 |
| RTT | 2328 |
| RTT | 2329 |
| RTT | 2330 |
| RTT | 2331 |
| RTT | 2332 |
| RTT | 2333 |
| RTT | 2334 |
| RTT | 2335 |
| RTT | 2336 |
| RTT | 2337 |
| RTT | 2338 |
| RTT | 2339 |
| RTT | 2340 |
| RTT | 2341 |
| RTT | 2342 |
| RTT | 2343 |
| RTT | 2344 |
| RTT | 2345 |
| RTT | 2346 |
| RTT | 2347 |
| RTT | 2348 |
| RTT | 2349 |
| RTT | 2350 |
| RTT | 2351 |
| RTT | 2352 |
| RTT | 2354 |
| RTT | 2355 |
| RTT | 2356 |
| RTT | 2357 |
| RTT | 2358 |
| RTT | 2359 |
| RTT | 2360 |
| RTT | 2361 |
| RTT | 2362 |
| RTT | 2363 |
| RTT | 2364 |
| RTT | 2365 |
| RTT | 2366 |
| RTT | 2367 |
| RTT | 2368 |
| RTT | 2369 |
| RTT | 2370 |
| RTT | 2371 |
| RTT | 2372 |
| RTT | 2373 |
| RTT | 2374 |
| RTT | 2375 |
| RTT | 2376 |
| RTT | 2377 |
| RTT | 2378 |
| RTT | 2379 |
| RTT | 2380 |
| RTT | 2381 |
| RTT | 2382 |
| RTT | 2383 |
| RTT | 2384 |
| RTT | 2385 |
| RTT | 2386 |
| RTT | 2387 |
| RTT | 2388 |
| RTT | 2389 |
| RTT | 2390 |
| RTT | 2391 |
| RTT | 2392 |
| RTT | 2393 |
| RTT | 2394 |
| RTT | 2395 |
| RTT | 2396 |
| RTT | 2397 |
| RTT | 2398 |
| RTT | 2400 |
| RTT | 2401 |
| RTT | 2402 |
| RTT | 2403 |
| RTT | 2404 |
| RTT | 2405 |
| RTT | 2406 |
| RTT | 2407 |
| RTT | 2408 |
| RTT | 2409 |
| RTT | 2410 |
| RTT | 2411 |
| RTT | 2412 |
| RTT | 2413 |
| RTT | 2414 |
| RTT | 2415 |
| RTT | 2416 |
| RTT | 2417 |
| RTT | 2418 |
| RTT | 2419 |
| RTT | 2420 |
| RTT | 2421 |
| RTT | 2422 |
| ngRNA Spacer | 2064 |
| ngRNA Spacer | 2423 |
| ngRNA Spacer | 2424 |
| ngRNA Spacer | 2425 |
| ngRNA Spacer | 2426 |
| ngRNA Spacer | 2427 |
| ngRNA Spacer | 2428 |
| ngRNA Spacer | 2429 |
| ngRNA Spacer | 2430 |
| ngRNA Spacer | 2431 |
| ngRNA Spacer | 2432 |
| ngRNA Spacer | 2433 |
| ngRNA Spacer | 2434 |
| ngRNA Spacer | 2435 |
| ngRNA Spacer | 2091 |
| ngRNA Spacer | 2060 |
| ngRNA Spacer | 2436 |
| ngRNA Spacer | 2437 |
| ngRNA Spacer | 2054 |
| ngRNA Spacer | 2070 |
| ngRNA Spacer | 2078 |
| ngRNA Spacer | 2046 |
| ngRNA Spacer | 2047 |
| ngRNA Spacer | 2050 |
| ngRNA Spacer | 2051 |
| ngRNA Spacer | 2057 |
| ngRNA Spacer | 2058 |
| ngRNA Spacer | 2061 |
| ngRNA Spacer | 2438 |
| ngRNA Spacer | 2080 |
| ngRNA Spacer | 71 |
| ngRNA Spacer | 61 |
| ngRNA Spacer | 66 |
| ngRNA Spacer | 2074 |
| ngRNA Spacer | 62 |
| ngRNA Spacer | 64 |
| ngRNA Spacer | 65 |
| ngRNA Spacer | 69 |
| ngRNA Spacer | 60 |
| ngRNA Spacer | 2083 |
| ngRNA Spacer | 2066 |
| ngRNA Spacer | 2056 |
| ngRNA Spacer | 2062 |
| ngRNA Spacer | 2089 |
| ngRNA Spacer | 2439 |
| ngRNA Spacer | 2090 |
| ngRNA Spacer | 2059 |
| ngRNA Spacer | 2081 |
| ngRNA Spacer | 2069 |
| ngRNA Spacer | 63 |
| ngRNA Spacer | 2088 |
| ngRNA Spacer | 2068 |
| ngRNA Spacer | 2440 |
| ngRNA Spacer | 2072 |
| ngRNA Spacer | 2079 |
| ngRNA Spacer | 2073 |
| ngRNA Spacer | 2077 |
| ngRNA Spacer | 2093 |
| ngRNA Spacer | 2071 |
| ngRNA Spacer | 2048 |
| ngRNA Spacer | 2049 |
| ngRNA Spacer | 41 |
| ngRNA Spacer | 2085 |
| ngRNA Spacer | 2087 |
| ngRNA Spacer | 2441 |
| ngRNA Spacer | 2045 |
| ngRNA Spacer | 2063 |
| ngRNA Spacer | 2084 |
| ngRNA Spacer | 2076 |
| ngRNA Spacer | 2095 |
| ngRNA Spacer | 2075 |
| ngRNA Spacer | 2442 |
| ngRNA Spacer | 2443 |
| ngRNA Spacer | 2092 |
| ngRNA Spacer | 2055 |
| ngRNA Spacer | 2052 |
| ngRNA Spacer | 2086 |
| ngRNA Spacer | 2444 |
| ngRNA Spacer | 2082 |
| ngRNA Spacer | 2067 |
| ngRNA Spacer | 2096 |
| ngRNA Spacer | 2094 |
| ngRNA Spacer | 2053 |
| pegRNA | 2445 |
| pegRNA | 2446 |
| pegRNA | 2447 |
| pegRNA | 2448 |
| pegRNA | 2449 |
| pegRNA | 2450 |
| pegRNA | 2451 |
| pegRNA | 2452 |
| pegRNA | 2453 |
| pegRNA | 2454 |
| pegRNA | 2455 |
| pegRNA | 2456 |
| pegRNA | 2457 |
| pegRNA | 2458 |
| pegRNA | 2459 |
| pegRNA | 2460 |
| pegRNA | 2461 |
| pegRNA | 2462 |
| pegRNA | 2463 |
| pegRNA | 2464 |
| pegRNA | 2465 |
| pegRNA | 2466 |
| pegRNA | 2467 |
| pegRNA | 2468 |
| pegRNA | 2469 |
| pegRNA | 2470 |
| pegRNA | 2471 |
| pegRNA | 2472 |
| pegRNA | 2473 |
| pegRNA | 2474 |
| pegRNA | 2475 |
| pegRNA | 2476 |
| pegRNA | 2477 |
| pegRNA | 2478 |
| pegRNA | 2479 |
| pegRNA | 2480 |
| pegRNA | 2481 |
| pegRNA | 2482 |
| pegRNA | 2483 |
| pegRNA | 2484 |
| pegRNA | 2485 |
| pegRNA | 2486 |
| pegRNA | 2487 |
| pegRNA | 2488 |
| pegRNA | 2489 |
| pegRNA | 2490 |
| pegRNA | 2491 |
| pegRNA | 2492 |
| pegRNA | 2493 |
| pegRNA | 2494 |
| pegRNA | 2495 |
| pegRNA | 2496 |
| pegRNA | 2497 |
| pegRNA | 2498 |
| pegRNA | 2499 |
| pegRNA | 2500 |
| pegRNA | 2501 |
| pegRNA | 2502 |
| pegRNA | 2503 |
| pegRNA | 2504 |
| pegRNA | 2505 |
| pegRNA | 2506 |
| pegRNA | 2507 |
| pegRNA | 2508 |
| pegRNA | 2509 |
| pegRNA | 2510 |
| pegRNA | 2511 |
| pegRNA | 2512 |
| pegRNA | 2513 |
| pegRNA | 2514 |
| pegRNA | 2515 |
| pegRNA | 2516 |
| pegRNA | 2517 |
| pegRNA | 2518 |
| pegRNA | 2519 |
| pegRNA | 2520 |
| pegRNA | 2521 |
| pegRNA | 2522 |
| pegRNA | 2523 |
| pegRNA | 2524 |
| pegRNA | 2525 |
| pegRNA | 2526 |
| pegRNA | 2527 |
| pegRNA | 2528 |
| pegRNA | 2529 |
| pegRNA | 2530 |
| pegRNA | 2531 |
| pegRNA | 2532 |
| pegRNA | 2533 |
| pegRNA | 2534 |
| pegRNA | 2535 |
| pegRNA | 2536 |
| pegRNA | 2537 |
| pegRNA | 2538 |
| pegRNA | 2539 |
| pegRNA | 2540 |
| pegRNA | 2541 |
| pegRNA | 2542 |
| pegRNA | 2543 |
| pegRNA | 2544 |
| pegRNA | 2545 |
| pegRNA | 2546 |
| pegRNA | 2547 |
| pegRNA | 2548 |
| pegRNA | 2549 |
| pegRNA | 2550 |
| pegRNA | 2551 |
| pegRNA | 2552 |
| pegRNA | 2553 |
| pegRNA | 2554 |
| pegRNA | 2555 |
| pegRNA | 2556 |
| pegRNA | 2557 |
| pegRNA | 2558 |
| pegRNA | 2559 |
| pegRNA | 2560 |
| pegRNA | 2561 |
| pegRNA | 2562 |
| pegRNA | 2563 |
| pegRNA | 2564 |
| pegRNA | 2565 |
| pegRNA | 2566 |
| pegRNA | 2567 |
| pegRNA | 2568 |
| pegRNA | 2569 |
| pegRNA | 2570 |
| pegRNA | 2571 |
| pegRNA | 2572 |
| pegRNA | 2573 |
| pegRNA | 2574 |
| pegRNA | 2575 |
| pegRNA | 2576 |
| pegRNA | 2577 |
| pegRNA | 2578 |
| pegRNA | 2579 |
| pegRNA | 2580 |
| pegRNA | 2581 |
| pegRNA | 2582 |
| pegRNA | 2583 |
| pegRNA | 2584 |
| pegRNA | 2585 |
| pegRNA | 2586 |
| pegRNA | 2587 |
| pegRNA | 2588 |
| pegRNA | 2589 |
| pegRNA | 2590 |
| pegRNA | 2591 |
| pegRNA | 2592 |
| pegRNA | 2593 |
| pegRNA | 2594 |
| pegRNA | 2595 |
| pegRNA | 2596 |
| pegRNA | 2597 |
| pegRNA | 2598 |
| pegRNA | 2599 |
| pegRNA | 2600 |
| pegRNA | 2601 |
| pegRNA | 2602 |
| pegRNA | 2603 |
| pegRNA | 2604 |
| pegRNA | 2605 |
| pegRNA | 2606 |
| pegRNA | 2607 |
| pegRNA | 2608 |
| pegRNA | 2609 |
| pegRNA | 2610 |
| pegRNA | 2611 |
| pegRNA | 2612 |
| pegRNA | 2613 |
| pegRNA | 2614 |
| pegRNA | 2615 |
| pegRNA | 2616 |
| pegRNA | 2617 |
| pegRNA | 2618 |
| pegRNA | 2619 |
| pegRNA | 2620 |
| pegRNA | 2621 |
| pegRNA | 2622 |
| pegRNA | 2623 |
| pegRNA | 2624 |
| pegRNA | 2625 |
| pegRNA | 2626 |
| pegRNA | 2627 |
| pegRNA | 2628 |
| pegRNA | 2629 |
| pegRNA | 2630 |
| pegRNA | 2631 |
| pegRNA | 2632 |
| pegRNA | 2633 |
| pegRNA | 2634 |
| pegRNA | 2635 |
| pegRNA | 2636 |
| pegRNA | 2637 |
| pegRNA | 2638 |
| pegRNA | 2639 |
| pegRNA | 2640 |
| pegRNA | 2641 |
| pegRNA | 2642 |
| pegRNA | 2643 |
| pegRNA | 2644 |
| pegRNA | 2645 |
| pegRNA | 2646 |
| pegRNA | 2647 |
| pegRNA | 2648 |
| pegRNA | 2649 |
| pegRNA | 2650 |
| pegRNA | 2651 |
| pegRNA | 2652 |
| pegRNA | 2653 |
| pegRNA | 2654 |
| pegRNA | 2655 |
| pegRNA | 2656 |
| pegRNA | 2657 |
| pegRNA | 2658 |
| pegRNA | 2659 |
| pegRNA | 2660 |
| pegRNA | 2661 |
| pegRNA | 2662 |
| pegRNA | 2663 |
| pegRNA | 2664 |
| pegRNA | 2665 |
| pegRNA | 2666 |
| pegRNA | 2667 |
| pegRNA | 2668 |
| pegRNA | 2669 |
| pegRNA | 2670 |
| pegRNA | 2671 |
| pegRNA | 2672 |
| pegRNA | 2673 |
| pegRNA | 2674 |
| pegRNA | 2675 |
| pegRNA | 2676 |
| pegRNA | 2677 |
| pegRNA | 2678 |
| pegRNA | 2679 |
| pegRNA | 2680 |
| pegRNA | 2681 |
| pegRNA | 2682 |
| pegRNA | 2683 |
| pegRNA | 2684 |
| pegRNA | 2685 |
| pegRNA | 2686 |
| pegRNA | 2687 |
| pegRNA | 2688 |
| pegRNA | 2689 |
| pegRNA | 2690 |
| pegRNA | 2691 |
| pegRNA | 2692 |
| pegRNA | 2693 |
| pegRNA | 2694 |
| pegRNA | 2695 |
| pegRNA | 2696 |
| pegRNA | 2697 |
| pegRNA | 2698 |
| pegRNA | 2699 |
| pegRNA | 2700 |
| pegRNA | 2701 |
| pegRNA | 2702 |
| pegRNA | 2703 |
| pegRNA | 2704 |
| pegRNA | 2705 |
| pegRNA | 2706 |
| pegRNA | 2707 |
| pegRNA | 2708 |
| pegRNA | 2709 |
| pegRNA | 2710 |
| pegRNA | 2711 |
| pegRNA | 2712 |
| pegRNA | 2713 |
| pegRNA | 2714 |
| pegRNA | 2715 |
| pegRNA | 2716 |
| pegRNA | 2717 |
| pegRNA | 2718 |
| pegRNA | 2719 |
| pegRNA | 2720 |
| pegRNA | 2721 |
| pegRNA | 2722 |
| pegRNA | 2723 |
| pegRNA | 2724 |
| pegRNA | 2725 |
| pegRNA | 2726 |
| pegRNA | 2727 |
| pegRNA | 2728 |
| pegRNA | 2729 |
| pegRNA | 2730 |
| pegRNA | 2731 |
| pegRNA | 2732 |
| pegRNA | 2733 |
| pegRNA | 2734 |
| pegRNA | 2735 |
| pegRNA | 2736 |
| pegRNA | 2737 |
| pegRNA | 2738 |
| pegRNA | 2739 |
| pegRNA | 2740 |
| pegRNA | 2741 |
| pegRNA | 2742 |
| pegRNA | 2743 |
| pegRNA | 2744 |
| pegRNA | 2745 |
| pegRNA | 2746 |
| pegRNA | 2747 |
| pegRNA | 2748 |
| pegRNA | 2749 |
| pegRNA | 2750 |
| pegRNA | 2751 |
| pegRNA | 2752 |
| pegRNA | 2753 |
| pegRNA | 2754 |
| pegRNA | 2755 |
| pegRNA | 2756 |
| pegRNA | 2757 |
| pegRNA | 2758 |
| pegRNA | 2759 |
| pegRNA | 2760 |
| pegRNA | 2761 |
| pegRNA | 2762 |
| pegRNA | 2763 |
| pegRNA | 2764 |
| pegRNA | 2765 |
| pegRNA | 2766 |
| pegRNA | 2767 |
| pegRNA | 2768 |
| pegRNA | 2769 |
| pegRNA | 2770 |
| pegRNA | 2771 |
| pegRNA | 2772 |
| pegRNA | 2773 |
| pegRNA | 2774 |
| pegRNA | 2775 |
| pegRNA | 2776 |
| pegRNA | 2777 |
| pegRNA | 2778 |
| pegRNA | 2779 |
| pegRNA | 2780 |
| pegRNA | 2781 |
| pegRNA | 2782 |
| pegRNA | 2783 |
| pegRNA | 2784 |
| pegRNA | 2785 |
| pegRNA | 2786 |
| pegRNA | 2787 |
| pegRNA | 2788 |
| pegRNA | 2789 |
| pegRNA | 2790 |
| pegRNA | 2791 |
| pegRNA | 2792 |
| pegRNA | 2793 |
| pegRNA | 2794 |
| pegRNA | 2795 |
| pegRNA | 2796 |
| pegRNA | 2797 |
| pegRNA | 2798 |
| pegRNA | 2799 |
| pegRNA | 2800 |
| pegRNA | 2801 |
| pegRNA | 2802 |
| pegRNA | 2803 |
| pegRNA | 2804 |
| pegRNA | 2805 |
| pegRNA | 2806 |
| pegRNA | 2807 |
| pegRNA | 2808 |
| pegRNA | 2809 |
| pegRNA | 2810 |
| pegRNA | 2811 |
| pegRNA | 2812 |
| pegRNA | 2813 |
| pegRNA | 2814 |
| pegRNA | 2815 |
| pegRNA | 2816 |
| pegRNA | 2817 |
| pegRNA | 2818 |
| pegRNA | 2819 |
| pegRNA | 2820 |
| pegRNA | 2821 |
| pegRNA | 2822 |
| pegRNA | 2823 |
| pegRNA | 2824 |
| pegRNA | 2825 |
| pegRNA | 2826 |
| pegRNA | 2827 |
| pegRNA | 2828 |
| pegRNA | 2829 |
| pegRNA | 2830 |
| pegRNA | 2831 |
| pegRNA | 2832 |
| pegRNA | 2833 |
| pegRNA | 2834 |
| pegRNA | 2835 |
| pegRNA | 2836 |
| pegRNA | 2837 |
| pegRNA | 2838 |
| pegRNA | 2839 |
| pegRNA | 2840 |
| pegRNA | 2841 |
| pegRNA | 2842 |
| pegRNA | 2843 |
| pegRNA | 2844 |
| pegRNA | 2845 |
| pegRNA | 2846 |
| pegRNA | 2847 |
| pegRNA | 2848 |
| pegRNA | 2849 |
| pegRNA | 2850 |
| pegRNA | 2851 |
| pegRNA | 2852 |
| pegRNA | 2853 |
| pegRNA | 2854 |
| pegRNA | 2855 |
| pegRNA | 2856 |
| pegRNA | 2857 |
| pegRNA | 2858 |
| pegRNA | 2859 |
| pegRNA | 2860 |
| pegRNA | 2861 |
| pegRNA | 2862 |
| pegRNA | 2863 |
| pegRNA | 2864 |
| pegRNA | 2865 |
| pegRNA | 2866 |
| pegRNA | 2867 |
| pegRNA | 2868 |
| pegRNA | 2869 |
| pegRNA | 2870 |
| pegRNA | 2871 |
| pegRNA | 2872 |
| pegRNA | 2873 |
| pegRNA | 2874 |
| pegRNA | 2875 |
| pegRNA | 2876 |
| pegRNA | 2877 |
| pegRNA | 2878 |
| pegRNA | 2879 |
| pegRNA | 2880 |
| pegRNA | 2881 |
| pegRNA | 2882 |
| pegRNA | 2883 |
| pegRNA | 2884 |
| pegRNA | 2885 |
| pegRNA | 2886 |
| pegRNA | 2887 |
| pegRNA | 2888 |
| pegRNA | 2889 |
| pegRNA | 2890 |
| pegRNA | 2891 |
| pegRNA | 2892 |
| pegRNA | 2893 |
| pegRNA | 2894 |
| pegRNA | 2895 |
| pegRNA | 2896 |
| pegRNA | 2897 |
| pegRNA | 2898 |
| pegRNA | 2899 |
| pegRNA | 2900 |
| pegRNA | 2901 |
| pegRNA | 2902 |
| pegRNA | 2903 |
| pegRNA | 2904 |
| pegRNA | 2905 |
| pegRNA | 2906 |
| pegRNA | 2907 |
| pegRNA | 2908 |
| pegRNA | 2909 |
| pegRNA | 2910 |
| pegRNA | 2911 |
| pegRNA | 2912 |
| pegRNA | 2913 |
| pegRNA | 2914 |
| pegRNA | 2915 |
| pegRNA | 2916 |
| pegRNA | 2917 |
| pegRNA | 2918 |
| pegRNA | 2919 |
| pegRNA | 2920 |
| pegRNA | 2921 |
| pegRNA | 2922 |
| pegRNA | 2923 |
| pegRNA | 2924 |
| pegRNA | 2925 |
| pegRNA | 2926 |
| pegRNA | 2927 |
| pegRNA | 2928 |
| pegRNA | 2929 |
| pegRNA | 2930 |
| pegRNA | 2931 |
| pegRNA | 2932 |
| pegRNA | 2933 |
| pegRNA | 2934 |
| pegRNA | 2935 |
| pegRNA | 2936 |
| pegRNA | 2937 |
| pegRNA | 2938 |
| pegRNA | 2939 |
| pegRNA | 2940 |
| pegRNA | 2941 |
| pegRNA | 2942 |
| pegRNA | 2943 |
| pegRNA | 2944 |
| pegRNA | 2945 |
| pegRNA | 2946 |
| pegRNA | 2947 |
| pegRNA | 2948 |
| pegRNA | 2949 |
| pegRNA | 2950 |
| pegRNA | 2951 |
| pegRNA | 2952 |
| pegRNA | 2953 |
| pegRNA | 2954 |
| pegRNA | 2955 |
| pegRNA | 2956 |
| pegRNA | 2957 |
| pegRNA | 2958 |
| pegRNA | 2959 |
| pegRNA | 2960 |
| pegRNA | 2961 |
| pegRNA | 2962 |
| pegRNA | 2963 |
| pegRNA | 2964 |
| pegRNA | 2965 |
| pegRNA | 2966 |
| pegRNA | 2967 |
| pegRNA | 2968 |
| pegRNA | 2969 |
| pegRNA | 2970 |
| pegRNA | 2971 |
| pegRNA | 2972 |
| pegRNA | 2973 |
| pegRNA | 2974 |
| pegRNA | 2975 |
| pegRNA | 2976 |
| pegRNA | 2977 |
| pegRNA | 2978 |
| pegRNA | 2979 |
| pegRNA | 2980 |
| pegRNA | 2981 |
| pegRNA | 2982 |
| pegRNA | 2983 |
| pegRNA | 2984 |
| pegRNA | 2985 |
| pegRNA | 2986 |
| pegRNA | 2987 |
| pegRNA | 2988 |
| pegRNA | 2989 |
| pegRNA | 2990 |
| pegRNA | 2991 |
| pegRNA | 2992 |
| pegRNA | 2993 |
| pegRNA | 2994 |
| pegRNA | 2995 |
| pegRNA | 2996 |
| pegRNA | 2997 |
| pegRNA | 2998 |
| pegRNA | 2999 |
| pegRNA | 3000 |
| pegRNA | 3001 |
| pegRNA | 3002 |
| pegRNA | 3003 |
| pegRNA | 3004 |
| pegRNA | 3005 |
| pegRNA | 3006 |
| pegRNA | 3007 |
| pegRNA | 3008 |
| pegRNA | 3009 |
| pegRNA | 3010 |
| pegRNA | 3011 |
| pegRNA | 3012 |
| pegRNA | 3013 |
| pegRNA | 3014 |
| pegRNA | 3015 |
| pegRNA | 3016 |
| pegRNA | 3017 |
| pegRNA | 3018 |
| pegRNA | 3019 |
| pegRNA | 3020 |
| pegRNA | 3021 |
| pegRNA | 3022 |
| pegRNA | 3023 |
| pegRNA | 3024 |
| pegRNA | 3025 |
| pegRNA | 3026 |
| pegRNA | 3027 |
| pegRNA | 3028 |
| pegRNA | 3029 |
| pegRNA | 3030 |
| pegRNA | 3031 |
| pegRNA | 3032 |
| pegRNA | 3033 |
| pegRNA | 3034 |
| pegRNA | 3035 |
| pegRNA | 3036 |
| pegRNA | 3037 |
| pegRNA | 3038 |
| pegRNA | 3039 |
| pegRNA | 3040 |
| pegRNA | 3041 |
| pegRNA | 3042 |
| pegRNA | 3043 |
| pegRNA | 3044 |
| pegRNA | 3045 |
| pegRNA | 3046 |
| pegRNA | 3047 |
| pegRNA | 3048 |
| pegRNA | 3049 |
| pegRNA | 3050 |
| pegRNA | 3051 |
| pegRNA | 3052 |
| pegRNA | 3053 |
| pegRNA | 3054 |
| pegRNA | 3055 |
| pegRNA | 3056 |
| pegRNA | 3057 |
| pegRNA | 3058 |
| pegRNA | 3059 |
| pegRNA | 3060 |
| pegRNA | 3061 |
| pegRNA | 3062 |
| pegRNA | 3063 |
| pegRNA | 3064 |
| pegRNA | 3065 |
| pegRNA | 3066 |
| pegRNA | 3067 |
| pegRNA | 3068 |
| pegRNA | 3069 |
| pegRNA | 3070 |
| pegRNA | 3071 |
| pegRNA | 3072 |
| pegRNA | 3073 |
| pegRNA | 3074 |
| pegRNA | 3075 |
| pegRNA | 3076 |
| pegRNA | 3077 |
| pegRNA | 3078 |
| pegRNA | 3079 |
| pegRNA | 3080 |
| pegRNA | 3081 |
| pegRNA | 3082 |
| pegRNA | 3083 |
| pegRNA | 3084 |
| pegRNA | 3085 |
| pegRNA | 3086 |
| pegRNA | 3087 |
| pegRNA | 3088 |
| pegRNA | 3089 |
| pegRNA | 3090 |
| pegRNA | 3091 |
| pegRNA | 3092 |
| pegRNA | 3093 |
| pegRNA | 3094 |
| pegRNA | 3095 |
| pegRNA | 3096 |
| pegRNA | 3097 |
| pegRNA | 3098 |
| pegRNA | 3099 |
| pegRNA | 3100 |
| pegRNA | 3101 |
| pegRNA | 3102 |
| pegRNA | 3103 |
| pegRNA | 3104 |
| pegRNA | 3105 |
| pegRNA | 3106 |
| pegRNA | 3107 |
| pegRNA | 3108 |
| pegRNA | 3109 |
| pegRNA | 3110 |
| pegRNA | 3111 |
| pegRNA | 3112 |
| pegRNA | 3113 |
| pegRNA | 3114 |
| pegRNA | 3115 |
| pegRNA | 3116 |
| pegRNA | 3117 |
| pegRNA | 3118 |
| pegRNA | 3119 |
| pegRNA | 3120 |
| pegRNA | 3121 |
| pegRNA | 3122 |
| pegRNA | 3123 |
| pegRNA | 3124 |
| pegRNA | 3125 |
| pegRNA | 3126 |
| pegRNA | 3127 |
| pegRNA | 3128 |
| pegRNA | 3129 |
| pegRNA | 3130 |
| pegRNA | 3131 |
| pegRNA | 3132 |
| pegRNA | 3133 |
| pegRNA | 3134 |
| pegRNA | 3135 |
| pegRNA | 3136 |
| pegRNA | 3137 |
| pegRNA | 3138 |
| pegRNA | 3139 |
| pegRNA | 3140 |
| pegRNA | 3141 |
| pegRNA | 3142 |
| pegRNA | 3143 |
| pegRNA | 3144 |
| pegRNA | 3145 |
| pegRNA | 3146 |
| pegRNA | 3147 |
| pegRNA | 3148 |
| pegRNA | 3149 |
| pegRNA | 3150 |
| pegRNA | 3151 |
| pegRNA | 3152 |
| pegRNA | 3153 |
| pegRNA | 3154 |
| pegRNA | 3155 |
| pegRNA | 3156 |
| pegRNA | 3157 |
| pegRNA | 3158 |
| pegRNA | 3159 |
| pegRNA | 3160 |
| pegRNA | 3161 |
| pegRNA | 3162 |
| pegRNA | 3163 |
| pegRNA | 3164 |
| pegRNA | 3165 |
| pegRNA | 3166 |
| pegRNA | 3167 |
| pegRNA | 3168 |
| pegRNA | 3169 |
| pegRNA | 3170 |
| pegRNA | 3171 |
| pegRNA | 3172 |
| pegRNA | 3173 |
| pegRNA | 3174 |
| pegRNA | 3175 |
| pegRNA | 3176 |
| pegRNA | 3177 |
| pegRNA | 3178 |
| pegRNA | 3179 |
| pegRNA | 3180 |
| pegRNA | 3181 |
| pegRNA | 3182 |
| pegRNA | 3183 |
| pegRNA | 3184 |
| pegRNA | 3185 |
| pegRNA | 3186 |
| pegRNA | 3187 |
| pegRNA | 3188 |
| pegRNA | 3189 |
| pegRNA | 3190 |
| pegRNA | 3191 |
| pegRNA | 3192 |
| pegRNA | 3193 |
| pegRNA | 3194 |
| pegRNA | 3195 |
| pegRNA | 3196 |
| pegRNA | 3197 |
| pegRNA | 3198 |
| pegRNA | 3199 |
| pegRNA | 3200 |
| pegRNA | 3201 |
| pegRNA | 3202 |
| pegRNA | 3203 |
| pegRNA | 3204 |
| pegRNA | 3205 |
| pegRNA | 3206 |
| pegRNA | 3207 |
| pegRNA | 3208 |
| pegRNA | 3209 |
| pegRNA | 3210 |
| pegRNA | 3211 |
| pegRNA | 3212 |
| pegRNA | 3213 |
| pegRNA | 3214 |
| pegRNA | 3215 |
| pegRNA | 3216 |
| pegRNA | 3217 |
| pegRNA | 3218 |
| pegRNA | 3219 |
| pegRNA | 3220 |
| pegRNA | 3221 |
| pegRNA | 3222 |
| pegRNA | 3223 |
| pegRNA | 3224 |
| pegRNA | 3225 |
| pegRNA | 3226 |
| pegRNA | 3227 |
| pegRNA | 3228 |
| pegRNA | 3229 |
| pegRNA | 3230 |
| pegRNA | 3231 |
| pegRNA | 3232 |
| pegRNA | 3233 |
| pegRNA | 3234 |
| pegRNA | 3235 |
| pegRNA | 3236 |
| pegRNA | 3237 |
| pegRNA | 3238 |
| pegRNA | 3239 |
| pegRNA | 3240 |
| pegRNA | 3241 |
| pegRNA | 3242 |
| pegRNA | 3243 |
| pegRNA | 3244 |
| pegRNA | 3245 |
| pegRNA | 3246 |
| pegRNA | 3247 |
| pegRNA | 3248 |
| pegRNA | 3249 |
| pegRNA | 3250 |
| pegRNA | 3251 |
| pegRNA | 3252 |
| pegRNA | 3253 |
| pegRNA | 3254 |
| pegRNA | 3255 |
| pegRNA | 3256 |
| pegRNA | 3257 |
| pegRNA | 3258 |
| pegRNA | 3259 |
| pegRNA | 3260 |
| pegRNA | 3261 |
| pegRNA | 3262 |
| pegRNA | 3263 |
| pegRNA | 3264 |
| pegRNA | 3265 |
| pegRNA | 3266 |
| pegRNA | 3267 |
| pegRNA | 3268 |
| pegRNA | 3269 |
| pegRNA | 3270 |
| pegRNA | 3271 |
| pegRNA | 3272 |
| pegRNA | 3273 |
| pegRNA | 3274 |
| pegRNA | 3275 |
| pegRNA | 3276 |
| pegRNA | 3277 |
| pegRNA | 3278 |
| pegRNA | 3279 |
| pegRNA | 3280 |
| pegRNA | 3281 |
| pegRNA | 3282 |
| pegRNA | 3283 |
| pegRNA | 3284 |
| pegRNA | 3285 |
| pegRNA | 3286 |
| pegRNA | 3287 |
| pegRNA | 3288 |
| pegRNA | 3289 |
| pegRNA | 3290 |
| pegRNA | 3291 |
| pegRNA | 3292 |
| pegRNA | 3293 |
| pegRNA | 3294 |
| pegRNA | 3295 |
| pegRNA | 3296 |
| pegRNA | 3297 |
| pegRNA | 3298 |
| pegRNA | 3299 |
| pegRNA | 3300 |
| pegRNA | 3301 |
| pegRNA | 3302 |
| pegRNA | 3303 |
| pegRNA | 3304 |
| pegRNA | 3305 |
| pegRNA | 3306 |
| pegRNA | 3307 |
| pegRNA | 3308 |
| pegRNA | 3309 |
| pegRNA | 3310 |
| pegRNA | 3311 |
| pegRNA | 3312 |
| pegRNA | 3313 |
| pegRNA | 3314 |
| pegRNA | 3315 |
| pegRNA | 3316 |
| pegRNA | 3317 |
| pegRNA | 3318 |
| pegRNA | 3319 |
| pegRNA | 3320 |
| pegRNA | 3321 |
| pegRNA | 3322 |
| pegRNA | 3323 |
| pegRNA | 3324 |
| pegRNA | 3325 |
| pegRNA | 3326 |
| pegRNA | 3327 |
| pegRNA | 3328 |
| pegRNA | 3329 |
| pegRNA | 3330 |
| pegRNA | 3331 |
| pegRNA | 3332 |
| pegRNA | 3333 |
| pegRNA | 3334 |
| pegRNA | 3335 |
| pegRNA | 3336 |
| pegRNA | 3337 |
| pegRNA | 3338 |
| pegRNA | 3339 |
| pegRNA | 3340 |
| pegRNA | 3341 |
| pegRNA | 3342 |
| pegRNA | 3343 |
| pegRNA | 3344 |
| pegRNA | 3345 |
| pegRNA | 3346 |
| pegRNA | 3347 |
| pegRNA | 3348 |
| pegRNA | 3349 |
| pegRNA | 3350 |
| pegRNA | 3351 |
| pegRNA | 3352 |
| pegRNA | 3353 |
| pegRNA | 3354 |
| pegRNA | 3355 |
| pegRNA | 3356 |
| pegRNA | 3357 |
| pegRNA | 3358 |
| pegRNA | 3359 |
| pegRNA | 3360 |
| pegRNA | 3361 |
| pegRNA | 3362 |
| pegRNA | 3363 |
| pegRNA | 3364 |
| pegRNA | 3365 |
| pegRNA | 3366 |
| pegRNA | 3367 |
| pegRNA | 3368 |
| pegRNA | 3369 |
| pegRNA | 3370 |
| pegRNA | 3371 |
| pegRNA | 3372 |
| pegRNA | 3373 |
| pegRNA | 3374 |
| pegRNA | 3375 |
| pegRNA | 3376 |
| pegRNA | 3377 |
| pegRNA | 3378 |
| pegRNA | 3379 |
| pegRNA | 3380 |
| pegRNA | 3381 |
| pegRNA | 3382 |
| pegRNA | 3383 |
| pegRNA | 3384 |
| pegRNA | 3385 |
| pegRNA | 3386 |
| pegRNA | 3387 |
| pegRNA | 3388 |
| pegRNA | 3389 |
| pegRNA | 3390 |
| pegRNA | 3391 |
| pegRNA | 3392 |
| pegRNA | 3393 |
| pegRNA | 3394 |
| pegRNA | 3395 |
| pegRNA | 3396 |
| pegRNA | 3397 |
| pegRNA | 3398 |
| pegRNA | 3399 |
| pegRNA | 3400 |
| pegRNA | 3401 |
| pegRNA | 3402 |
| pegRNA | 3403 |
| pegRNA | 3404 |
| pegRNA | 3405 |
| pegRNA | 3406 |
| pegRNA | 3407 |
| pegRNA | 3408 |
| pegRNA | 3409 |
| pegRNA | 3410 |
| pegRNA | 3411 |
| pegRNA | 3412 |
| pegRNA | 3413 |
| pegRNA | 3414 |
| pegRNA | 3415 |
| pegRNA | 3416 |
| pegRNA | 3417 |
| pegRNA | 3418 |
| pegRNA | 3419 |
| pegRNA | 3420 |
| pegRNA | 3421 |
| pegRNA | 3422 |
| pegRNA | 3423 |
| pegRNA | 3424 |
| pegRNA | 3425 |
| pegRNA | 3426 |
| pegRNA | 3427 |
| pegRNA | 3428 |
| pegRNA | 3429 |
| pegRNA | 3430 |
| pegRNA | 3431 |
| pegRNA | 3432 |
| pegRNA | 3433 |
| pegRNA | 3434 |
| pegRNA | 3435 |
| pegRNA | 3436 |
| pegRNA | 3437 |
| pegRNA | 3438 |
| pegRNA | 3439 |
| pegRNA | 3440 |
| pegRNA | 3441 |
| pegRNA | 3442 |
| pegRNA | 3443 |
| pegRNA | 3444 |
| pegRNA | 3445 |
| pegRNA | 3446 |
| pegRNA | 3447 |
| pegRNA | 3448 |
| pegRNA | 3449 |
| pegRNA | 3450 |
| pegRNA | 3451 |
| pegRNA | 3452 |
| pegRNA | 3453 |
| pegRNA | 3454 |
| pegRNA | 3455 |
| pegRNA | 3456 |
| pegRNA | 3457 |
| pegRNA | 3458 |
| pegRNA | 3459 |
| pegRNA | 3460 |
| pegRNA | 3461 |
| pegRNA | 3462 |
| pegRNA | 3463 |
| pegRNA | 3464 |
| pegRNA | 3465 |
| pegRNA | 3466 |
| pegRNA | 3467 |
| pegRNA | 3468 |
| pegRNA | 3469 |
| pegRNA | 3470 |
| pegRNA | 3471 |
| pegRNA | 3472 |
| pegRNA | 3473 |
| pegRNA | 3474 |
| pegRNA | 3475 |
| pegRNA | 3476 |
| pegRNA | 3477 |
| pegRNA | 3478 |
| pegRNA | 3479 |
| pegRNA | 3480 |
| pegRNA | 3481 |
| pegRNA | 3482 |
| pegRNA | 3483 |
| pegRNA | 3484 |
| pegRNA | 3485 |
| pegRNA | 3486 |
| pegRNA | 3487 |
| pegRNA | 3488 |
| pegRNA | 3489 |
| pegRNA | 3490 |
| pegRNA | 3491 |
| pegRNA | 3492 |
| pegRNA | 3493 |
| pegRNA | 3494 |
| pegRNA | 3495 |
| pegRNA | 3496 |
| pegRNA | 3497 |
| pegRNA | 3498 |
| pegRNA | 3499 |
| pegRNA | 3500 |
| pegRNA | 3501 |
| pegRNA | 3502 |
| pegRNA | 3503 |
| pegRNA | 3504 |
| pegRNA | 3505 |
| pegRNA | 3506 |
| pegRNA | 3507 |
| pegRNA | 3508 |
| pegRNA | 3509 |
| pegRNA | 3510 |
| pegRNA | 3511 |
| pegRNA | 3512 |
| pegRNA | 3513 |
| pegRNA | 3514 |
| pegRNA | 3515 |
| pegRNA | 3516 |
| pegRNA | 3517 |
| pegRNA | 3518 |
| pegRNA | 3519 |
| pegRNA | 3520 |
| pegRNA | 3521 |
| pegRNA | 3522 |
| pegRNA | 3523 |
| pegRNA | 3524 |
| pegRNA | 3525 |
| pegRNA | 3526 |
| pegRNA | 3527 |
| pegRNA | 3528 |
| pegRNA | 3529 |
| pegRNA | 3530 |
| pegRNA | 3531 |
| pegRNA | 3532 |
| pegRNA | 3533 |
| pegRNA | 3534 |
| pegRNA | 3535 |
| pegRNA | 3536 |
| pegRNA | 3537 |
| pegRNA | 3538 |
| pegRNA | 3539 |
| pegRNA | 3540 |
| pegRNA | 3541 |
| pegRNA | 3542 |
| pegRNA | 3543 |
| pegRNA | 3544 |
| pegRNA | 3545 |
| pegRNA | 3546 |
| pegRNA | 3547 |
| pegRNA | 3548 |
| pegRNA | 3549 |
| pegRNA | 3550 |
| pegRNA | 3551 |
| pegRNA | 3552 |
| pegRNA | 3553 |
| pegRNA | 3554 |
| pegRNA | 3555 |
| pegRNA | 3556 |
| pegRNA | 3557 |
| pegRNA | 3558 |
| pegRNA | 3559 |
| pegRNA | 3560 |
| pegRNA | 3561 |
| pegRNA | 3562 |
| pegRNA | 3563 |
| pegRNA | 3564 |
| pegRNA | 3565 |
| pegRNA | 3566 |
| pegRNA | 3567 |
| pegRNA | 3568 |
| pegRNA | 3569 |
| pegRNA | 3570 |
| pegRNA | 3571 |
| pegRNA | 3572 |
| pegRNA | 3573 |
| pegRNA | 3574 |
| pegRNA | 3575 |
| pegRNA | 3576 |
| pegRNA | 3577 |
| pegRNA | 3578 |
| pegRNA | 3579 |
| pegRNA | 3580 |
| pegRNA | 3581 |
| pegRNA | 3582 |
| pegRNA | 3583 |
| pegRNA | 3584 |
| pegRNA | 3585 |
| pegRNA | 3586 |
| pegRNA | 3587 |
| pegRNA | 3588 |
| pegRNA | 3589 |
| pegRNA | 3590 |
| pegRNA | 3591 |
| pegRNA | 3592 |
| pegRNA | 3593 |
| pegRNA | 3594 |
| pegRNA | 3595 |
| pegRNA | 3596 |
| pegRNA | 3597 |
| pegRNA | 3598 |
| pegRNA | 3599 |
| pegRNA | 3600 |
| pegRNA | 3601 |
| pegRNA | 3602 |
| pegRNA | 3603 |
| pegRNA | 3604 |
| pegRNA | 3605 |
| pegRNA | 3606 |
| pegRNA | 3607 |
| pegRNA | 3608 |
| pegRNA | 3609 |
| pegRNA | 3610 |
| pegRNA | 3611 |
| pegRNA | 3612 |
| pegRNA | 3613 |
| pegRNA | 3614 |
| pegRNA | 3615 |
| pegRNA | 3616 |
| pegRNA | 3617 |
| pegRNA | 3618 |
| pegRNA | 3619 |
| pegRNA | 3620 |
| pegRNA | 3621 |
| pegRNA | 3622 |
| pegRNA | 3623 |
| pegRNA | 3624 |
| pegRNA | 3625 |
| pegRNA | 3626 |
| pegRNA | 3627 |
| pegRNA | 3628 |
| pegRNA | 3629 |
| pegRNA | 3630 |
| pegRNA | 3631 |
| pegRNA | 3632 |
| pegRNA | 3633 |
| pegRNA | 3634 |
| pegRNA | 3635 |
| pegRNA | 3636 |
| pegRNA | 3637 |
| pegRNA | 3638 |
| pegRNA | 3639 |
| pegRNA | 3640 |
| pegRNA | 3641 |
| pegRNA | 3642 |
| pegRNA | 3643 |
| pegRNA | 3644 |
| pegRNA | 3645 |
| pegRNA | 3646 |
| pegRNA | 3647 |
| pegRNA | 3648 |
| pegRNA | 3649 |
| pegRNA | 3650 |
| pegRNA | 3651 |
| pegRNA | 3652 |
| pegRNA | 3653 |
| pegRNA | 3654 |
| pegRNA | 3655 |
| pegRNA | 3656 |
| pegRNA | 3657 |
| pegRNA | 3658 |
| pegRNA | 3659 |
| pegRNA | 3660 |
| pegRNA | 3661 |
| pegRNA | 3662 |
| pegRNA | 3663 |
| pegRNA | 3664 |
| pegRNA | 3665 |
| pegRNA | 3666 |
| pegRNA | 3667 |
| pegRNA | 3668 |
| pegRNA | 3669 |
| pegRNA | 3670 |
| pegRNA | 3671 |
| pegRNA | 3672 |
| pegRNA | 3673 |
| pegRNA | 3674 |
| pegRNA | 3675 |
| pegRNA | 3676 |
| pegRNA | 3677 |
| pegRNA | 3678 |
| pegRNA | 3679 |
| pegRNA | 3680 |
| pegRNA | 3681 |
| pegRNA | 3682 |
| pegRNA | 3683 |
| pegRNA | 3684 |
| pegRNA | 3685 |
| pegRNA | 3686 |
| pegRNA | 3687 |
| pegRNA | 3688 |
| pegRNA | 3689 |
| pegRNA | 3690 |
| pegRNA | 3691 |
| pegRNA | 3692 |
| pegRNA | 3693 |
| pegRNA | 3694 |
| pegRNA | 3695 |
| pegRNA | 3696 |
| pegRNA | 3697 |
| pegRNA | 3698 |
| pegRNA | 3699 |
| pegRNA | 3700 |
| pegRNA | 3701 |
| pegRNA | 3702 |
| pegRNA | 3703 |
| pegRNA | 3704 |
| pegRNA | 3705 |
| pegRNA | 3706 |
| pegRNA | 3707 |
| pegRNA | 3708 |
| pegRNA | 3709 |
| pegRNA | 3710 |
| pegRNA | 3711 |
| pegRNA | 3712 |
| pegRNA | 3713 |
| pegRNA | 3714 |
| pegRNA | 3715 |
| pegRNA | 3716 |
| pegRNA | 3717 |
| pegRNA | 3718 |
| pegRNA | 3719 |
| pegRNA | 3720 |
| pegRNA | 3721 |
| pegRNA | 3722 |
| pegRNA | 3723 |
| pegRNA | 3724 |
| pegRNA | 3725 |
| pegRNA | 3726 |
| pegRNA | 3727 |
| pegRNA | 3728 |
| pegRNA | 3729 |
| pegRNA | 3730 |
| pegRNA | 3731 |
| pegRNA | 3732 |
| pegRNA | 3733 |
| pegRNA | 3734 |
| pegRNA | 3735 |
| pegRNA | 3736 |
| pegRNA | 3737 |
| pegRNA | 3738 |
| pegRNA | 3739 |
| pegRNA | 3740 |
| pegRNA | 3741 |
| pegRNA | 3742 |
| pegRNA | 3743 |
| pegRNA | 3744 |
| pegRNA | 3745 |
| pegRNA | 3746 |
| pegRNA | 3747 |
| pegRNA | 3748 |
| pegRNA | 3749 |
| pegRNA | 3750 |
| pegRNA | 3751 |
| pegRNA | 3752 |
| pegRNA | 3753 |
| pegRNA | 3754 |
| pegRNA | 3755 |
| pegRNA | 3756 |
| pegRNA | 3757 |
| pegRNA | 3758 |
| pegRNA | 3759 |
| pegRNA | 3760 |
| pegRNA | 3761 |
| pegRNA | 3762 |
| pegRNA | 3763 |
| pegRNA | 3764 |
| pegRNA | 3765 |
| pegRNA | 3766 |
| pegRNA | 3767 |
| pegRNA | 3768 |
| pegRNA | 3769 |
| pegRNA | 3770 |
| pegRNA | 3771 |
| pegRNA | 3772 |
| pegRNA | 3773 |
| pegRNA | 3774 |
| pegRNA | 3775 |
| pegRNA | 3776 |
| pegRNA | 3777 |
| pegRNA | 3778 |
| pegRNA | 3779 |
| pegRNA | 3780 |
| pegRNA | 3781 |
| pegRNA | 3782 |
| pegRNA | 3783 |
| pegRNA | 3784 |
| pegRNA | 3785 |
| pegRNA | 3786 |
| pegRNA | 3787 |
| pegRNA | 3788 |
| pegRNA | 3789 |
| pegRNA | 3790 |
| pegRNA | 3791 |
| pegRNA | 3792 |
| pegRNA | 3793 |
| pegRNA | 3794 |
| pegRNA | 3795 |
| pegRNA | 3796 |
| pegRNA | 3797 |
| pegRNA | 3798 |
| pegRNA | 3799 |
| pegRNA | 3800 |
| pegRNA | 3801 |
| pegRNA | 3802 |
| pegRNA | 3803 |
| pegRNA | 3804 |
| pegRNA | 3805 |
| pegRNA | 3806 |
| pegRNA | 3807 |
| pegRNA | 3808 |
| pegRNA | 3809 |
| pegRNA | 3810 |
| pegRNA | 3811 |
| pegRNA | 3812 |
| pegRNA | 3813 |
| pegRNA | 3814 |
| pegRNA | 3815 |
| pegRNA | 3816 |
| pegRNA | 3817 |
| pegRNA | 3818 |
| pegRNA | 3819 |
| pegRNA | 3820 |
| pegRNA | 3821 |
| pegRNA | 3822 |
| pegRNA | 3823 |
| pegRNA | 3824 |
| pegRNA | 3825 |
| pegRNA | 3826 |
| pegRNA | 3827 |
| pegRNA | 3828 |
| pegRNA | 3829 |
| pegRNA | 3830 |
| pegRNA | 3831 |
| pegRNA | 3832 |
| pegRNA | 3833 |
| pegRNA | 3834 |
| pegRNA | 3835 |
| pegRNA | 3836 |
| pegRNA | 3837 |
| pegRNA | 3838 |
| pegRNA | 3839 |
| pegRNA | 3840 |
| pegRNA | 3841 |
| pegRNA | 3842 |
| pegRNA | 3843 |
| pegRNA | 3844 |
| pegRNA | 3845 |
| pegRNA | 3846 |
| pegRNA | 3847 |
| pegRNA | 3848 |
| pegRNA | 3849 |
| pegRNA | 3850 |
| pegRNA | 3851 |
| pegRNA | 3852 |
| pegRNA | 3853 |
| pegRNA | 3854 |
| pegRNA | 3855 |
| pegRNA | 3856 |
| pegRNA | 3857 |
| pegRNA | 3858 |
| pegRNA | 3859 |
| pegRNA | 3860 |
| pegRNA | 3861 |
| pegRNA | 3862 |
| pegRNA | 3863 |
| pegRNA | 3864 |
| pegRNA | 3865 |
| pegRNA | 3866 |
| pegRNA | 3867 |
| pegRNA | 3868 |
| pegRNA | 3869 |
| pegRNA | 3870 |
| pegRNA | 3871 |
| pegRNA | 3872 |
| pegRNA | 3873 |
| pegRNA | 3874 |
| pegRNA | 3875 |
| pegRNA | 3876 |
| pegRNA | 3877 |
| pegRNA | 3878 |
| pegRNA | 3879 |
| pegRNA | 3880 |
| pegRNA | 3881 |
| pegRNA | 3882 |
| pegRNA | 3883 |
| pegRNA | 3884 |
| pegRNA | 3885 |
| pegRNA | 3886 |
| pegRNA | 3887 |
| pegRNA | 3888 |
| pegRNA | 3889 |
| pegRNA | 3890 |
| pegRNA | 3891 |
| pegRNA | 3892 |
| pegRNA | 3893 |
| pegRNA | 3894 |
| pegRNA | 3895 |
| pegRNA | 3896 |
| pegRNA | 3897 |
| pegRNA | 3898 |
| pegRNA | 3899 |
| pegRNA | 3900 |
| pegRNA | 3901 |
| pegRNA | 3902 |
| pegRNA | 3903 |
| pegRNA | 3904 |
| pegRNA | 3905 |
| pegRNA | 3906 |
| pegRNA | 3907 |
| pegRNA | 3908 |
| pegRNA | 3909 |
| pegRNA | 3910 |
| pegRNA | 3911 |
| pegRNA | 3912 |
| pegRNA | 3913 |
| pegRNA | 3914 |
| pegRNA | 3915 |
| pegRNA | 3916 |
| pegRNA | 3917 |
| pegRNA | 3918 |
| pegRNA | 3919 |
| pegRNA | 3920 |
| pegRNA | 3921 |
| pegRNA | 3922 |
| pegRNA | 3923 |
| pegRNA | 3924 |
| pegRNA | 3925 |
| pegRNA | 3926 |
| pegRNA | 3927 |
| pegRNA | 3928 |
| pegRNA | 3929 |
| pegRNA | 3930 |
| pegRNA | 3931 |
| pegRNA | 3932 |
| pegRNA | 3933 |
| pegRNA | 3934 |
| pegRNA | 3935 |
| pegRNA | 3936 |
| pegRNA | 3937 |
| pegRNA | 3938 |
| pegRNA | 3939 |
| pegRNA | 3940 |
| pegRNA | 3941 |
| pegRNA | 3942 |
| pegRNA | 3943 |
| pegRNA | 3944 |
| pegRNA | 3945 |
| pegRNA | 3946 |
| pegRNA | 3947 |
| pegRNA | 3948 |
| pegRNA | 3949 |
| pegRNA | 3950 |
| pegRNA | 3951 |
| pegRNA | 3952 |
| pegRNA | 3953 |
| pegRNA | 3954 |
| pegRNA | 3955 |
| pegRNA | 3956 |
| pegRNA | 3957 |
| pegRNA | 3958 |
| pegRNA | 3959 |
| pegRNA | 3960 |
| pegRNA | 3961 |
| pegRNA | 3962 |
| pegRNA | 3963 |
| pegRNA | 3964 |
| pegRNA | 3965 |
| pegRNA | 3966 |
| pegRNA | 3967 |
| pegRNA | 3968 |
| pegRNA | 3969 |
| pegRNA | 3970 |
| pegRNA | 3971 |
| pegRNA | 3972 |
| pegRNA | 3973 |
| pegRNA | 3974 |
| pegRNA | 3975 |
| pegRNA | 3976 |
| pegRNA | 3977 |
| pegRNA | 3978 |
| pegRNA | 3979 |
| pegRNA | 3980 |
| pegRNA | 3981 |
| pegRNA | 3982 |
| pegRNA | 3983 |
| pegRNA | 3984 |
| pegRNA | 3985 |
| pegRNA | 3986 |
| pegRNA | 3987 |
| pegRNA | 3988 |
| pegRNA | 3989 |
| pegRNA | 3990 |
| pegRNA | 3991 |
| pegRNA | 3992 |
| pegRNA | 3993 |
| pegRNA | 3994 |
| pegRNA | 3995 |
| pegRNA | 3996 |
| pegRNA | 3997 |
| pegRNA | 3998 |
| pegRNA | 3999 |
| pegRNA | 4000 |
| pegRNA | 4001 |
| pegRNA | 4002 |
| pegRNA | 4003 |
| pegRNA | 4004 |
| pegRNA | 4005 |
| pegRNA | 4006 |
| pegRNA | 4007 |
| pegRNA | 4008 |
| pegRNA | 4009 |
| pegRNA | 4010 |
| pegRNA | 4011 |
| pegRNA | 4012 |
| pegRNA | 4013 |
| pegRNA | 4014 |
| pegRNA | 4015 |
| pegRNA | 4016 |
| pegRNA | 4017 |
| pegRNA | 4018 |
| pegRNA | 4019 |
| pegRNA | 4020 |
| pegRNA | 4021 |
| pegRNA | 4022 |
| pegRNA | 4023 |
| pegRNA | 4024 |
| pegRNA | 4025 |
| pegRNA | 4026 |
| pegRNA | 4027 |
| pegRNA | 4028 |
| pegRNA | 4029 |
| pegRNA | 4030 |
| pegRNA | 4031 |
| pegRNA | 4032 |
| pegRNA | 4033 |
| pegRNA | 4034 |
| pegRNA | 4035 |
| pegRNA | 4036 |
| pegRNA | 4037 |
| pegRNA | 4038 |
| pegRNA | 4039 |
| pegRNA | 4040 |
| pegRNA | 4041 |
| pegRNA | 4042 |
| pegRNA | 4043 |
| pegRNA | 4044 |
| pegRNA | 4045 |
| pegRNA | 4046 |
| pegRNA | 4047 |
| pegRNA | 4048 |
| pegRNA | 4049 |
| pegRNA | 4050 |
| pegRNA | 4051 |
| pegRNA | 4052 |
| pegRNA | 4053 |
| pegRNA | 4054 |
| pegRNA | 4055 |
| pegRNA | 4056 |
| pegRNA | 4057 |
| pegRNA | 4058 |
| pegRNA | 4059 |
| pegRNA | 4060 |
| pegRNA | 4061 |
| pegRNA | 4062 |
| pegRNA | 4063 |
| pegRNA | 4064 |
| pegRNA | 4065 |
| pegRNA | 4066 |
| pegRNA | 4067 |
| pegRNA | 4068 |
| pegRNA | 4069 |
| pegRNA | 4070 |
| pegRNA | 4071 |
| pegRNA | 4072 |
| pegRNA | 4073 |
| pegRNA | 4074 |
| pegRNA | 4075 |
| pegRNA | 4076 |
| pegRNA | 4077 |
| pegRNA | 4078 |
| pegRNA | 4079 |
| pegRNA | 4080 |
| pegRNA | 4081 |
| pegRNA | 4082 |
| pegRNA | 4083 |
| pegRNA | 4084 |
| pegRNA | 4085 |
| pegRNA | 4086 |
| pegRNA | 4087 |
| pegRNA | 4088 |
| pegRNA | 4089 |
| pegRNA | 4090 |
| pegRNA | 4091 |
| pegRNA | 4092 |
| pegRNA | 4093 |
| pegRNA | 4094 |
| pegRNA | 4095 |
| pegRNA | 4096 |
| pegRNA | 4097 |
| pegRNA | 4098 |
| pegRNA | 4099 |
| pegRNA | 4100 |
| pegRNA | 4101 |
| pegRNA | 4102 |
| pegRNA | 4103 |
| pegRNA | 4104 |
| pegRNA | 4105 |
| pegRNA | 4106 |
| pegRNA | 4107 |
| pegRNA | 4108 |
| pegRNA | 4109 |
| pegRNA | 4110 |
| pegRNA | 4111 |
| pegRNA | 4112 |
| pegRNA | 4113 |
| pegRNA | 4114 |
| pegRNA | 4115 |
| pegRNA | 4116 |
| pegRNA | 4117 |
| pegRNA | 4118 |
| pegRNA | 4119 |
| pegRNA | 4120 |
| pegRNA | 4121 |
| pegRNA | 4122 |
| pegRNA | 4123 |
| pegRNA | 4124 |
| pegRNA | 4125 |
| pegRNA | 4126 |
| pegRNA | 4127 |
| pegRNA | 4128 |
| pegRNA | 4129 |
| pegRNA | 4130 |
| pegRNA | 4131 |
| pegRNA | 4132 |
| pegRNA | 4133 |
| pegRNA | 4134 |
| pegRNA | 4135 |
| pegRNA | 4136 |
| pegRNA | 4137 |
| pegRNA | 4138 |
| pegRNA | 4139 |
| pegRNA | 4140 |
| pegRNA | 4141 |
| pegRNA | 4142 |
| pegRNA | 4143 |
| pegRNA | 4144 |
| pegRNA | 4145 |
| pegRNA | 4146 |
| pegRNA | 4147 |
| pegRNA | 4148 |
| pegRNA | 4149 |
| pegRNA | 4150 |
| pegRNA | 4151 |
| pegRNA | 4152 |
| pegRNA | 4153 |
| pegRNA | 4154 |
| pegRNA | 4155 |
| pegRNA | 4156 |
| pegRNA | 4157 |
| pegRNA | 4158 |
| pegRNA | 4159 |
| pegRNA | 4160 |
| pegRNA | 4161 |
| pegRNA | 4162 |
| pegRNA | 4163 |
| pegRNA | 4164 |
| pegRNA | 4165 |
| pegRNA | 4166 |
| pegRNA | 4167 |
| pegRNA | 4168 |
| pegRNA | 4169 |
| pegRNA | 4170 |
| pegRNA | 4171 |
| pegRNA | 4172 |
| pegRNA | 4173 |
| pegRNA | 4174 |
| pegRNA | 4175 |
| pegRNA | 4176 |
| pegRNA | 4177 |
| pegRNA | 4178 |
| pegRNA | 4179 |
| pegRNA | 4180 |
| pegRNA | 4181 |
| pegRNA | 4182 |
| pegRNA | 4183 |
| pegRNA | 4184 |
| pegRNA | 4185 |
| pegRNA | 4186 |
| pegRNA | 4187 |
| pegRNA | 4188 |
| pegRNA | 4189 |
| pegRNA | 4190 |
| pegRNA | 4191 |
| pegRNA | 4192 |
| pegRNA | 4193 |
| pegRNA | 4194 |
| pegRNA | 4195 |
| pegRNA | 4196 |
| pegRNA | 4197 |
| pegRNA | 4198 |
| pegRNA | 4199 |
| pegRNA | 4200 |
| pegRNA | 4201 |
| pegRNA | 4202 |
| pegRNA | 4203 |
| pegRNA | 4204 |
| pegRNA | 4205 |
| pegRNA | 4206 |
| pegRNA | 4207 |
| pegRNA | 4208 |
| pegRNA | 4209 |
| pegRNA | 4210 |
| pegRNA | 4211 |
| pegRNA | 4212 |
| pegRNA | 4213 |
| pegRNA | 4214 |
| pegRNA | 4215 |
| pegRNA | 4216 |
| pegRNA | 4217 |
| pegRNA | 4218 |
| pegRNA | 4219 |
| pegRNA | 4220 |
| pegRNA | 4221 |
| pegRNA | 4222 |
| pegRNA | 4223 |
| pegRNA | 4224 |
| pegRNA | 4225 |
| pegRNA | 4226 |
| pegRNA | 4227 |
| pegRNA | 4228 |
| pegRNA | 4229 |
| pegRNA | 4230 |
| pegRNA | 4231 |
| pegRNA | 4232 |
| pegRNA | 4233 |
| pegRNA | 4234 |
| pegRNA | 4235 |
| pegRNA | 4236 |
| pegRNA | 4237 |
| pegRNA | 4238 |
| pegRNA | 4239 |
| pegRNA | 4240 |
| pegRNA | 4241 |
| pegRNA | 4242 |
| pegRNA | 4243 |
| pegRNA | 4244 |
| pegRNA | 4245 |
| pegRNA | 4246 |
| pegRNA | 4247 |
| pegRNA | 4248 |
| pegRNA | 4249 |
| pegRNA | 4250 |
| pegRNA | 4251 |
| pegRNA | 4252 |
| pegRNA | 4253 |
| pegRNA | 4254 |
| pegRNA | 4255 |
| pegRNA | 4256 |
| pegRNA | 4257 |
| pegRNA | 4258 |
| pegRNA | 4259 |
| pegRNA | 4260 |
| pegRNA | 4261 |
| pegRNA | 4262 |
| pegRNA | 4263 |
| pegRNA | 4264 |
| pegRNA | 4265 |
| pegRNA | 4266 |
| pegRNA | 4267 |
| pegRNA | 4268 |
| pegRNA | 4269 |
| pegRNA | 4270 |
| pegRNA | 4271 |
| pegRNA | 4272 |
| pegRNA | 4273 |
| pegRNA | 4274 |
| pegRNA | 4275 |
| pegRNA | 4276 |
| pegRNA | 4277 |
| pegRNA | 4278 |
| pegRNA | 4279 |
| pegRNA | 4280 |
| pegRNA | 4281 |
| pegRNA | 4282 |
| pegRNA | 4283 |
| pegRNA | 4284 |
| pegRNA | 4285 |
| pegRNA | 4286 |
| pegRNA | 4287 |
| pegRNA | 4288 |
| pegRNA | 4289 |
| pegRNA | 4290 |
| pegRNA | 4291 |
| pegRNA | 4292 |
| pegRNA | 4293 |
| pegRNA | 4294 |
| pegRNA | 4295 |
| pegRNA | 4296 |
| pegRNA | 4297 |
| pegRNA | 4298 |
| pegRNA | 4299 |
| pegRNA | 4300 |
| pegRNA | 4301 |
| pegRNA | 4302 |
| pegRNA | 4303 |
| pegRNA | 4304 |
| pegRNA | 4305 |
| pegRNA | 4306 |
| pegRNA | 4307 |
| pegRNA | 4308 |
| pegRNA | 4309 |
| pegRNA | 4310 |
| pegRNA | 4311 |
| pegRNA | 4312 |
| pegRNA | 4313 |
| pegRNA | 4314 |
| pegRNA | 4315 |
| pegRNA | 4316 |
| pegRNA | 4317 |
| pegRNA | 4318 |
| pegRNA | 4319 |
| pegRNA | 4320 |
| pegRNA | 4321 |
| pegRNA | 4322 |
| pegRNA | 4323 |
| pegRNA | 4324 |
| pegRNA | 4325 |
| pegRNA | 4326 |
| pegRNA | 4327 |
| pegRNA | 4328 |
| pegRNA | 4329 |
| pegRNA | 4330 |
| pegRNA | 4331 |
| pegRNA | 4332 |
| pegRNA | 4333 |
| pegRNA | 4334 |
| pegRNA | 4335 |
| pegRNA | 4336 |
| pegRNA | 4337 |
| pegRNA | 4338 |
| pegRNA | 4339 |
| pegRNA | 4340 |
| pegRNA | 4341 |
| pegRNA | 4342 |
| pegRNA | 4343 |
| pegRNA | 4344 |
| pegRNA | 4345 |
| pegRNA | 4346 |
| pegRNA | 4347 |
| pegRNA | 4348 |
| pegRNA | 4349 |
| pegRNA | 4350 |
| pegRNA | 4351 |
| pegRNA | 4352 |
| pegRNA | 4353 |
| pegRNA | 4354 |
| pegRNA | 4355 |
| pegRNA | 4356 |
| pegRNA | 4357 |
| pegRNA | 4358 |
| pegRNA | 4359 |
| pegRNA | 4360 |
| pegRNA | 4361 |
| pegRNA | 4362 |
| pegRNA | 4363 |
| pegRNA | 4364 |
| pegRNA | 4365 |
| pegRNA | 4366 |
| pegRNA | 4367 |
| pegRNA | 4368 |
| pegRNA | 4369 |
| pegRNA | 4370 |
| pegRNA | 4371 |
| pegRNA | 4372 |
| pegRNA | 4373 |
| pegRNA | 4374 |
| pegRNA | 4375 |
| pegRNA | 4376 |
| pegRNA | 4377 |
| pegRNA | 4378 |
| pegRNA | 4379 |
| pegRNA | 4380 |
| pegRNA | 4381 |
| pegRNA | 4382 |
| pegRNA | 4383 |
| pegRNA | 4384 |
| pegRNA | 4385 |
| pegRNA | 4386 |
| pegRNA | 4387 |
| pegRNA | 4388 |
| pegRNA | 4389 |
| pegRNA | 4390 |
| pegRNA | 4391 |
| pegRNA | 4392 |
| pegRNA | 4393 |
| pegRNA | 4394 |
| pegRNA | 4395 |
| pegRNA | 4396 |
| pegRNA | 4397 |
| pegRNA | 4398 |
| pegRNA | 4399 |
| pegRNA | 4400 |
| pegRNA | 4401 |
| pegRNA | 4402 |
| pegRNA | 4403 |
| pegRNA | 4404 |
| pegRNA | 4405 |
| pegRNA | 4406 |
| pegRNA | 4407 |
| pegRNA | 4408 |
| pegRNA | 4409 |
| ngRNA | 2268 |
| ngRNA | 2257 |
| ngRNA | 4410 |
| ngRNA | 4411 |
| ngRNA | 4412 |
| ngRNA | 2275 |
| ngRNA | 2267 |
| ngRNA | 2266 |
| ngRNA | 4413 |
| ngRNA | 2272 |
| ngRNA | 2271 |
| ngRNA | 4414 |
| ngRNA | 2270 |
| ngRNA | 2263 |
| ngRNA | 2265 |
| ngRNA | 2261 |
| ngRNA | 2264 |
| ngRNA | 4415 |
| ngRNA | 2258 |
| ngRNA | 2276 |
| ngRNA | 2262 |
| ngRNA | 2273 |
| ngRNA | 2274 |
| ngRNA | 2260 |
| ngRNA | 4416 |
| ngRNA | 2269 |
| ngRNA | 4417 |
| ngRNA | 2277 |
| ngRNA | 4418 |
| ngRNA | 2259 |
| ngRNA | 4419 |
| ngRNA | 2280 |
| ngRNA | 4420 |
| ngRNA | 4421 |
| ngRNA | 2286 |
| ngRNA | 4422 |
| ngRNA | 2288 |
| ngRNA | 2289 |
| ngRNA | 2279 |
| ngRNA | 2281 |
| ngRNA | 2282 |
| ngRNA | 2285 |
| ngRNA | 2283 |
| ngRNA | 2287 |
| ngRNA | 2278 |
| ngRNA | 2284 |
| ngRNA | 4423 |
| ngRNA | 2291 |
| ngRNA | 4424 |
| ngRNA | 2290 |
| ngRNA | 2292 |

TABLE 16

| Sequence region | SEQ ID |
|---|---|
| pegRNA Spacer | 4425 |
| PBS | 4426 |
| PBS | 4427 |
| PBS | 4428 |
| PBS | 2297 |
| PBS | 4429 |
| PBS | 4430 |
| PBS | 4431 |
| PBS | 4432 |
| PBS | 4433 |
| PBS | 4434 |
| PBS | 4435 |
| PBS | 4436 |
| RTT | 4437 |
| RTT | 4438 |
| RTT | 4439 |
| RTT | 4440 |
| RTT | 4441 |
| RTT | 4442 |
| RTT | 4443 |
| RTT | 4444 |
| RTT | 4445 |
| RTT | 4446 |
| RTT | 4447 |
| RTT | 4448 |
| RTT | 4449 |
| RTT | 4450 |
| RTT | 4451 |
| RTT | 4452 |
| RTT | 4453 |
| RTT | 4454 |
| RTT | 4455 |
| RTT | 4456 |
| RTT | 4457 |
| RTT | 4458 |
| RTT | 4459 |
| RTT | 4460 |
| RTT | 4461 |
| RTT | 4462 |
| RTT | 4463 |
| RTT | 4464 |
| RTT | 4465 |
| RTT | 4466 |
| RTT | 4467 |
| RTT | 4468 |
| RTT | 4469 |
| RTT | 4470 |
| RTT | 4471 |
| RTT | 4472 |
| RTT | 4473 |
| RTT | 4474 |
| RTT | 4475 |
| RTT | 4476 |
| RTT | 4477 |
| RTT | 4478 |
| RTT | 4479 |
| RTT | 4480 |
| RTT | 4481 |
| RTT | 4482 |
| RTT | 4483 |
| RTT | 4484 |
| RTT | 4485 |
| RTT | 4486 |
| RTT | 4487 |
| RTT | 4488 |
| RTT | 4489 |
| RTT | 4490 |
| RTT | 4491 |
| RTT | 4492 |
| ngRNA Spacer | 2083 |
| ngRNA Spacer | 2080 |
| ngRNA Spacer | 2091 |
| ngRNA Spacer | 2442 |
| ngRNA Spacer | 2066 |
| ngRNA Spacer | 2067 |
| ngRNA Spacer | 2075 |
| ngRNA Spacer | 2057 |
| ngRNA Spacer | 2050 |
| ngRNA Spacer | 2058 |
| ngRNA Spacer | 2072 |
| ngRNA Spacer | 2076 |
| ngRNA Spacer | 2079 |
| ngRNA Spacer | 2078 |
| ngRNA Spacer | 2051 |
| ngRNA Spacer | 2046 |
| ngRNA Spacer | 2065 |
| ngRNA Spacer | 2085 |
| ngRNA Spacer | 2049 |
| ngRNA Spacer | 2047 |
| ngRNA Spacer | 2061 |
| ngRNA Spacer | 2064 |
| ngRNA Spacer | 2068 |
| ngRNA Spacer | 2082 |
| ngRNA Spacer | 2054 |
| ngRNA Spacer | 2062 |
| ngRNA Spacer | 2056 |
| ngRNA Spacer | 2094 |
| ngRNA Spacer | 2045 |
| ngRNA Spacer | 2090 |
| ngRNA Spacer | 2086 |
| ngRNA Spacer | 2074 |
| ngRNA Spacer | 2095 |
| ngRNA Spacer | 2084 |
| ngRNA Spacer | 65 |
| ngRNA Spacer | 2059 |
| ngRNA Spacer | 71 |
| ngRNA Spacer | 66 |
| ngRNA Spacer | 62 |
| ngRNA Spacer | 63 |
| ngRNA Spacer | 64 |
| ngRNA Spacer | 69 |
| ngRNA Spacer | 2088 |
| ngRNA Spacer | 2070 |
| ngRNA Spacer | 60 |
| ngRNA Spacer | 61 |
| ngRNA Spacer | 2089 |
| ngRNA Spacer | 2063 |
| ngRNA Spacer | 2093 |
| ngRNA Spacer | 2073 |
| ngRNA Spacer | 2081 |
| ngRNA Spacer | 2071 |
| ngRNA Spacer | 2055 |
| ngRNA Spacer | 2087 |
| ngRNA Spacer | 2069 |
| ngRNA Spacer | 2048 |
| ngRNA Spacer | 2437 |
| ngRNA Spacer | 41 |
| ngRNA Spacer | 2077 |
| ngRNA Spacer | 2439 |
| ngRNA Spacer | 2092 |
| ngRNA Spacer | 2060 |
| ngRNA Spacer | 2052 |
| ngRNA Spacer | 2443 |
| ngRNA Spacer | 2053 |
| ngRNA Spacer | 2096 |
| ngRNA Spacer | 2444 |
| pegRNA | 4493 |
| pegRNA | 4494 |
| pegRNA | 4495 |
| pegRNA | 4496 |
| pegRNA | 4497 |
| pegRNA | 4498 |
| pegRNA | 4499 |
| pegRNA | 4500 |
| pegRNA | 4501 |
| pegRNA | 4502 |
| pegRNA | 4503 |
| pegRNA | 4504 |
| pegRNA | 4505 |
| pegRNA | 4504 |
| pegRNA | 4506 |
| pegRNA | 4507 |
| pegRNA | 4508 |
| pegRNA | 4509 |
| pegRNA | 4510 |
| pegRNA | 4511 |
| pegRNA | 4512 |
| pegRNA | 4513 |
| pegRNA | 4514 |
| pegRNA | 4515 |
| pegRNA | 4516 |
| pegRNA | 4517 |
| pegRNA | 4518 |
| pegRNA | 4519 |
| pegRNA | 4520 |
| pegRNA | 4521 |
| pegRNA | 4522 |
| pegRNA | 4523 |
| pegRNA | 4524 |
| pegRNA | 4525 |
| pegRNA | 4526 |
| pegRNA | 4527 |
| pegRNA | 4528 |
| pegRNA | 4529 |
| pegRNA | 4522 |
| pegRNA | 4530 |
| pegRNA | 4531 |
| pegRNA | 4532 |
| pegRNA | 4533 |
| pegRNA | 4534 |
| pegRNA | 4535 |
| pegRNA | 4536 |
| pegRNA | 4537 |
| pegRNA | 4538 |
| pegRNA | 4539 |
| pegRNA | 4540 |
| pegRNA | 4541 |
| pegRNA | 4542 |
| pegRNA | 4543 |
| pegRNA | 4544 |
| pegRNA | 4545 |
| pegRNA | 4546 |
| pegRNA | 4547 |
| pegRNA | 4548 |
| pegRNA | 4549 |
| pegRNA | 4550 |
| pegRNA | 4551 |
| pegRNA | 4552 |
| pegRNA | 4553 |
| pegRNA | 4554 |
| pegRNA | 4555 |
| pegRNA | 4556 |
| pegRNA | 4557 |
| pegRNA | 4558 |
| pegRNA | 4559 |
| pegRNA | 4560 |
| pegRNA | 4559 |
| pegRNA | 4561 |
| pegRNA | 4562 |
| pegRNA | 4563 |
| pegRNA | 4564 |
| pegRNA | 4565 |
| pegRNA | 4566 |
| pegRNA | 4567 |
| pegRNA | 4568 |
| pegRNA | 4569 |
| pegRNA | 4570 |
| pegRNA | 4571 |
| pegRNA | 4572 |
| pegRNA | 4573 |
| pegRNA | 4574 |
| pegRNA | 4575 |
| pegRNA | 4576 |
| pegRNA | 4577 |
| pegRNA | 4578 |
| pegRNA | 4579 |
| pegRNA | 4580 |
| pegRNA | 4581 |
| pegRNA | 4582 |
| pegRNA | 4583 |
| pegRNA | 4584 |
| pegRNA | 4585 |
| pegRNA | 4586 |
| pegRNA | 4587 |
| pegRNA | 4588 |
| pegRNA | 4589 |
| pegRNA | 4590 |
| pegRNA | 4591 |
| pegRNA | 4592 |
| pegRNA | 4593 |
| pegRNA | 4594 |
| pegRNA | 4595 |
| pegRNA | 4588 |
| pegRNA | 4596 |
| pegRNA | 4591 |
| pegRNA | 4597 |
| pegRNA | 4598 |
| pegRNA | 4599 |
| pegRNA | 4600 |
| pegRNA | 4601 |
| pegRNA | 4602 |
| pegRNA | 4603 |
| pegRNA | 4604 |
| pegRNA | 4605 |
| pegRNA | 4606 |
| pegRNA | 4607 |
| pegRNA | 4608 |
| pegRNA | 4609 |
| pegRNA | 4610 |
| pegRNA | 4611 |
| pegRNA | 4612 |
| pegRNA | 4613 |
| pegRNA | 4614 |
| pegRNA | 4615 |
| pegRNA | 4616 |
| pegRNA | 4617 |
| pegRNA | 4618 |
| pegRNA | 4619 |
| pegRNA | 4620 |
| pegRNA | 4621 |
| pegRNA | 4622 |
| pegRNA | 4623 |
| pegRNA | 4624 |
| pegRNA | 4625 |
| pegRNA | 4626 |
| pegRNA | 4627 |
| pegRNA | 4628 |
| pegRNA | 4629 |
| pegRNA | 4630 |
| pegRNA | 4631 |
| pegRNA | 4632 |
| pegRNA | 4633 |
| pegRNA | 4634 |
| pegRNA | 4635 |
| pegRNA | 4636 |
| pegRNA | 4637 |
| pegRNA | 4638 |
| pegRNA | 4639 |
| pegRNA | 4640 |
| pegRNA | 4641 |
| pegRNA | 4642 |
| pegRNA | 4643 |
| pegRNA | 4644 |
| pegRNA | 4645 |
| pegRNA | 4646 |
| pegRNA | 4647 |
| pegRNA | 4648 |
| pegRNA | 4649 |
| pegRNA | 4650 |
| pegRNA | 4651 |
| pegRNA | 4652 |
| pegRNA | 4653 |
| pegRNA | 4654 |
| pegRNA | 4655 |
| pegRNA | 4656 |
| pegRNA | 4657 |
| pegRNA | 4658 |
| pegRNA | 4659 |
| pegRNA | 4660 |
| pegRNA | 4661 |
| pegRNA | 4662 |
| pegRNA | 4663 |
| pegRNA | 4664 |
| pegRNA | 4665 |
| pegRNA | 4666 |
| pegRNA | 4667 |
| pegRNA | 4668 |
| pegRNA | 4669 |
| pegRNA | 4670 |
| pegRNA | 4671 |
| pegRNA | 4672 |
| pegRNA | 4673 |
| pegRNA | 4674 |
| pegRNA | 4675 |
| pegRNA | 4676 |
| pegRNA | 4677 |
| pegRNA | 4678 |
| pegRNA | 4679 |
| pegRNA | 4680 |
| pegRNA | 4681 |
| pegRNA | 4682 |
| pegRNA | 4683 |
| pegRNA | 4684 |
| pegRNA | 4685 |
| pegRNA | 4686 |
| pegRNA | 4687 |
| pegRNA | 4688 |
| pegRNA | 4689 |
| pegRNA | 4690 |
| pegRNA | 4691 |
| pegRNA | 4692 |
| pegRNA | 4693 |
| pegRNA | 4694 |
| pegRNA | 4695 |
| pegRNA | 4696 |
| pegRNA | 4697 |
| pegRNA | 4698 |
| pegRNA | 4699 |
| pegRNA | 4700 |
| pegRNA | 4701 |
| pegRNA | 4702 |
| pegRNA | 4703 |
| pegRNA | 4697 |
| pegRNA | 4704 |
| pegRNA | 4700 |
| pegRNA | 4705 |
| pegRNA | 4706 |
| pegRNA | 4707 |
| pegRNA | 4708 |
| pegRNA | 4709 |
| pegRNA | 4710 |
| pegRNA | 4711 |
| pegRNA | 4712 |
| pegRNA | 4713 |
| pegRNA | 4714 |
| pegRNA | 4715 |
| pegRNA | 4716 |
| pegRNA | 4717 |
| pegRNA | 4718 |
| pegRNA | 4719 |
| pegRNA | 4720 |
| pegRNA | 4721 |
| pegRNA | 4722 |
| pegRNA | 4723 |
| pegRNA | 4724 |
| pegRNA | 4725 |
| pegRNA | 4726 |
| pegRNA | 4727 |
| pegRNA | 4728 |
| pegRNA | 4729 |
| pegRNA | 4730 |
| pegRNA | 4731 |
| pegRNA | 4732 |
| pegRNA | 4733 |
| pegRNA | 4734 |
| pegRNA | 4735 |
| pegRNA | 4736 |
| pegRNA | 4737 |
| pegRNA | 4738 |
| pegRNA | 4739 |
| pegRNA | 4740 |
| pegRNA | 4741 |
| pegRNA | 4742 |
| pegRNA | 4743 |
| pegRNA | 4744 |
| pegRNA | 4745 |
| pegRNA | 4746 |
| pegRNA | 4747 |
| pegRNA | 4748 |
| pegRNA | 4749 |
| pegRNA | 4750 |
| pegRNA | 4751 |
| pegRNA | 4752 |
| pegRNA | 4753 |
| pegRNA | 4754 |
| pegRNA | 4755 |
| pegRNA | 4756 |
| pegRNA | 4757 |
| pegRNA | 4758 |
| pegRNA | 4759 |
| pegRNA | 4760 |
| pegRNA | 4761 |
| pegRNA | 4762 |
| pegRNA | 4763 |
| pegRNA | 4764 |
| pegRNA | 4765 |
| pegRNA | 4766 |
| pegRNA | 4767 |
| pegRNA | 4768 |
| pegRNA | 4769 |
| pegRNA | 4770 |
| pegRNA | 4771 |
| pegRNA | 4772 |
| pegRNA | 4773 |
| pegRNA | 4774 |
| pegRNA | 4775 |
| pegRNA | 4776 |
| pegRNA | 4777 |
| pegRNA | 4778 |
| pegRNA | 4779 |
| pegRNA | 4780 |
| pegRNA | 4781 |
| pegRNA | 4782 |
| pegRNA | 4783 |
| pegRNA | 4784 |
| pegRNA | 4785 |
| pegRNA | 4786 |
| pegRNA | 4763 |
| pegRNA | 4787 |
| pegRNA | 4788 |
| pegRNA | 4789 |
| pegRNA | 4790 |
| pegRNA | 4791 |
| pegRNA | 4792 |
| pegRNA | 4793 |
| pegRNA | 4794 |
| pegRNA | 4795 |
| pegRNA | 4796 |
| pegRNA | 4797 |
| pegRNA | 4798 |
| pegRNA | 4799 |
| pegRNA | 4800 |
| pegRNA | 4801 |
| pegRNA | 4802 |
| pegRNA | 4803 |
| pegRNA | 4804 |
| pegRNA | 4805 |
| pegRNA | 4806 |
| pegRNA | 4807 |
| pegRNA | 4808 |
| pegRNA | 4809 |
| pegRNA | 4810 |
| pegRNA | 4811 |
| pegRNA | 4812 |
| pegRNA | 4813 |
| pegRNA | 4814 |
| pegRNA | 4815 |
| pegRNA | 4816 |
| pegRNA | 4817 |
| pegRNA | 4818 |
| pegRNA | 4819 |
| pegRNA | 4820 |
| pegRNA | 4821 |
| pegRNA | 4822 |
| pegRNA | 4823 |
| pegRNA | 4824 |
| pegRNA | 4825 |
| pegRNA | 4826 |
| pegRNA | 4827 |
| pegRNA | 4828 |
| pegRNA | 4829 |
| pegRNA | 4830 |
| pegRNA | 4831 |
| pegRNA | 4832 |
| pegRNA | 4833 |
| pegRNA | 4834 |
| pegRNA | 4835 |
| pegRNA | 4836 |
| pegRNA | 4837 |
| pegRNA | 4838 |
| pegRNA | 4839 |
| pegRNA | 4840 |
| pegRNA | 4841 |
| pegRNA | 4826 |
| pegRNA | 4842 |
| pegRNA | 4843 |
| pegRNA | 4844 |
| pegRNA | 4845 |
| pegRNA | 4846 |
| pegRNA | 4847 |
| pegRNA | 4848 |
| pegRNA | 4849 |
| pegRNA | 4850 |
| pegRNA | 4851 |
| pegRNA | 4852 |
| pegRNA | 4853 |
| pegRNA | 4854 |
| pegRNA | 4855 |
| pegRNA | 4856 |
| pegRNA | 4857 |
| pegRNA | 4858 |
| pegRNA | 4859 |
| pegRNA | 4860 |
| pegRNA | 4861 |
| pegRNA | 4862 |
| pegRNA | 4863 |
| pegRNA | 4864 |
| pegRNA | 4865 |
| pegRNA | 4866 |
| pegRNA | 4867 |
| pegRNA | 4868 |
| pegRNA | 4869 |
| pegRNA | 4870 |
| pegRNA | 4871 |
| pegRNA | 4872 |
| pegRNA | 4873 |
| pegRNA | 4874 |
| pegRNA | 4875 |
| pegRNA | 4873 |
| pegRNA | 4876 |
| pegRNA | 4877 |
| pegRNA | 4878 |
| pegRNA | 4879 |
| pegRNA | 4871 |
| pegRNA | 4880 |
| pegRNA | 4881 |
| pegRNA | 4882 |
| pegRNA | 4883 |
| pegRNA | 4884 |
| pegRNA | 4885 |
| pegRNA | 4886 |
| pegRNA | 4887 |
| pegRNA | 4888 |
| pegRNA | 4889 |
| pegRNA | 4890 |
| pegRNA | 4891 |
| pegRNA | 4892 |
| pegRNA | 4893 |
| pegRNA | 4894 |
| pegRNA | 4895 |
| pegRNA | 4896 |
| pegRNA | 4897 |
| pegRNA | 4898 |
| pegRNA | 4899 |
| pegRNA | 4900 |
| pegRNA | 4901 |
| pegRNA | 4902 |
| pegRNA | 4903 |
| pegRNA | 4904 |
| pegRNA | 4905 |
| pegRNA | 4906 |
| pegRNA | 4907 |
| pegRNA | 4908 |
| pegRNA | 4907 |
| pegRNA | 4909 |
| pegRNA | 4910 |
| pegRNA | 4911 |
| pegRNA | 4912 |
| pegRNA | 4913 |
| pegRNA | 4914 |
| pegRNA | 4915 |
| pegRNA | 4916 |
| pegRNA | 4917 |
| pegRNA | 4918 |
| pegRNA | 4919 |
| pegRNA | 4920 |
| pegRNA | 4921 |
| pegRNA | 4922 |
| pegRNA | 4923 |
| pegRNA | 4924 |
| pegRNA | 4925 |
| pegRNA | 4926 |
| pegRNA | 4927 |
| pegRNA | 4928 |
| pegRNA | 4929 |
| pegRNA | 4930 |
| pegRNA | 4931 |
| pegRNA | 4932 |
| pegRNA | 4933 |
| pegRNA | 4934 |
| pegRNA | 4935 |
| pegRNA | 4936 |
| pegRNA | 4937 |
| pegRNA | 4938 |
| pegRNA | 4939 |
| pegRNA | 4940 |
| pegRNA | 4941 |
| pegRNA | 4942 |
| pegRNA | 4943 |
| pegRNA | 4944 |
| pegRNA | 4945 |
| pegRNA | 4946 |
| pegRNA | 4947 |
| pegRNA | 4948 |
| pegRNA | 4949 |
| pegRNA | 4950 |
| pegRNA | 4951 |
| pegRNA | 4952 |
| pegRNA | 4949 |
| pegRNA | 4953 |
| pegRNA | 4951 |
| pegRNA | 4954 |
| pegRNA | 4955 |
| pegRNA | 4956 |
| pegRNA | 4957 |
| pegRNA | 4958 |
| pegRNA | 4959 |
| pegRNA | 4960 |
| pegRNA | 4961 |
| pegRNA | 4962 |
| pegRNA | 4963 |
| pegRNA | 4964 |
| pegRNA | 4965 |
| pegRNA | 4966 |
| pegRNA | 4967 |
| pegRNA | 4968 |
| pegRNA | 4969 |
| pegRNA | 4970 |
| pegRNA | 4971 |
| pegRNA | 4972 |
| pegRNA | 4973 |
| pegRNA | 4974 |
| pegRNA | 4970 |
| pegRNA | 4975 |
| pegRNA | 4976 |
| pegRNA | 4977 |
| pegRNA | 4978 |
| pegRNA | 4979 |
| pegRNA | 4971 |
| pegRNA | 4980 |
| pegRNA | 4981 |
| pegRNA | 4982 |
| pegRNA | 4983 |
| pegRNA | 4984 |
| pegRNA | 4985 |
| pegRNA | 4986 |
| pegRNA | 4987 |
| pegRNA | 4988 |
| pegRNA | 4989 |
| pegRNA | 4990 |
| pegRNA | 4991 |
| pegRNA | 4992 |
| pegRNA | 4993 |
| pegRNA | 4994 |
| pegRNA | 4995 |
| pegRNA | 4996 |
| pegRNA | 4997 |
| pegRNA | 4998 |
| pegRNA | 4999 |
| pegRNA | 5000 |
| pegRNA | 5001 |
| pegRNA | 5002 |
| pegRNA | 5003 |
| pegRNA | 5004 |
| pegRNA | 5005 |
| pegRNA | 5006 |
| pegRNA | 5007 |
| pegRNA | 5008 |
| pegRNA | 5009 |
| pegRNA | 5010 |
| pegRNA | 5004 |
| pegRNA | 5005 |
| pegRNA | 5011 |
| pegRNA | 5012 |
| pegRNA | 5013 |
| pegRNA | 5014 |
| pegRNA | 5015 |
| pegRNA | 5016 |
| pegRNA | 5017 |
| pegRNA | 5018 |
| pegRNA | 5019 |
| pegRNA | 5020 |
| pegRNA | 5021 |
| pegRNA | 5022 |
| pegRNA | 5023 |
| pegRNA | 5024 |
| pegRNA | 5025 |
| pegRNA | 5026 |
| pegRNA | 5027 |
| pegRNA | 5028 |
| pegRNA | 5029 |
| pegRNA | 5030 |
| pegRNA | 5031 |
| pegRNA | 5032 |
| pegRNA | 5033 |
| pegRNA | 5034 |
| pegRNA | 5033 |
| pegRNA | 5035 |
| pegRNA | 5036 |
| pegRNA | 5037 |
| pegRNA | 5038 |
| pegRNA | 5039 |
| pegRNA | 5039 |
| pegRNA | 5040 |
| pegRNA | 5041 |
| pegRNA | 5042 |
| pegRNA | 5043 |
| pegRNA | 5044 |
| pegRNA | 5045 |
| pegRNA | 5046 |
| pegRNA | 5047 |
| pegRNA | 5048 |
| pegRNA | 5049 |
| pegRNA | 5050 |
| pegRNA | 5051 |
| pegRNA | 5052 |
| pegRNA | 5053 |
| pegRNA | 5054 |
| pegRNA | 5055 |
| pegRNA | 5056 |
| pegRNA | 5057 |
| pegRNA | 5058 |
| pegRNA | 5059 |
| pegRNA | 5060 |
| pegRNA | 5058 |
| pegRNA | 5061 |
| pegRNA | 5062 |
| pegRNA | 5063 |
| pegRNA | 5064 |
| pegRNA | 5065 |
| pegRNA | 5066 |
| pegRNA | 5067 |
| pegRNA | 5063 |
| pegRNA | 5068 |
| pegRNA | 5069 |
| pegRNA | 5070 |
| pegRNA | 5071 |
| pegRNA | 5072 |
| pegRNA | 5073 |
| pegRNA | 5074 |
| pegRNA | 5075 |
| pegRNA | 5076 |
| pegRNA | 5077 |
| pegRNA | 5078 |
| pegRNA | 5079 |
| pegRNA | 5080 |
| pegRNA | 5081 |
| pegRNA | 5082 |
| pegRNA | 5083 |
| pegRNA | 5084 |
| pegRNA | 5085 |
| pegRNA | 5086 |
| pegRNA | 5084 |
| pegRNA | 5087 |
| pegRNA | 5088 |
| pegRNA | 5089 |
| pegRNA | 5090 |
| pegRNA | 5091 |
| pegRNA | 5092 |
| pegRNA | 5093 |
| pegRNA | 5094 |
| pegRNA | 5095 |
| pegRNA | 5096 |
| pegRNA | 5097 |
| pegRNA | 5098 |
| pegRNA | 5099 |
| pegRNA | 5100 |
| pegRNA | 5101 |
| pegRNA | 5102 |
| pegRNA | 5103 |
| pegRNA | 5104 |
| pegRNA | 5105 |
| pegRNA | 5106 |
| pegRNA | 5107 |
| pegRNA | 5108 |
| pegRNA | 5109 |
| pegRNA | 5110 |
| pegRNA | 5111 |
| pegRNA | 5112 |
| pegRNA | 5113 |
| pegRNA | 5114 |
| pegRNA | 5115 |
| pegRNA | 5116 |
| pegRNA | 5117 |
| pegRNA | 5115 |
| pegRNA | 5118 |
| pegRNA | 5119 |
| pegRNA | 5120 |
| pegRNA | 5121 |
| pegRNA | 5122 |
| pegRNA | 5123 |
| pegRNA | 5124 |
| pegRNA | 5125 |
| pegRNA | 5126 |
| pegRNA | 5127 |
| pegRNA | 5128 |
| pegRNA | 5129 |
| pegRNA | 5130 |
| pegRNA | 5131 |
| pegRNA | 5132 |
| pegRNA | 5133 |
| pegRNA | 5134 |
| pegRNA | 5135 |
| pegRNA | 5136 |
| pegRNA | 5137 |
| pegRNA | 5138 |
| pegRNA | 5139 |
| pegRNA | 5140 |
| pegRNA | 5141 |
| pegRNA | 5142 |
| pegRNA | 5143 |
| pegRNA | 5144 |
| pegRNA | 5145 |
| pegRNA | 5146 |
| pegRNA | 5147 |
| pegRNA | 5148 |
| pegRNA | 5149 |
| pegRNA | 5150 |
| pegRNA | 5151 |
| pegRNA | 5152 |
| pegRNA | 5153 |
| pegRNA | 5154 |
| pegRNA | 5155 |
| pegRNA | 5156 |
| pegRNA | 5157 |
| pegRNA | 5158 |
| pegRNA | 5159 |
| pegRNA | 5160 |
| pegRNA | 5161 |
| pegRNA | 5162 |
| pegRNA | 5163 |
| pegRNA | 5164 |
| pegRNA | 5165 |
| pegRNA | 5166 |
| pegRNA | 5167 |
| pegRNA | 5168 |
| pegRNA | 5169 |
| pegRNA | 5170 |
| pegRNA | 5171 |
| pegRNA | 5172 |
| pegRNA | 5173 |
| pegRNA | 5174 |
| pegRNA | 5175 |
| pegRNA | 5176 |
| pegRNA | 5177 |
| pegRNA | 5178 |
| pegRNA | 5179 |
| pegRNA | 5180 |
| pegRNA | 5181 |
| pegRNA | 5182 |
| pegRNA | 5183 |
| pegRNA | 5184 |
| pegRNA | 5185 |
| pegRNA | 5186 |
| pegRNA | 5187 |
| pegRNA | 5188 |
| pegRNA | 5189 |
| pegRNA | 5190 |
| pegRNA | 5191 |
| pegRNA | 5192 |
| pegRNA | 5193 |
| pegRNA | 5194 |
| pegRNA | 5195 |
| pegRNA | 5196 |
| pegRNA | 5197 |
| pegRNA | 5198 |
| pegRNA | 5199 |
| pegRNA | 5200 |
| pegRNA | 5201 |
| pegRNA | 5202 |
| pegRNA | 5203 |
| pegRNA | 5204 |
| pegRNA | 5205 |
| ngRNA | 2267 |
| ngRNA | 2257 |
| ngRNA | 2277 |
| ngRNA | 2276 |
| ngRNA | 2262 |
| ngRNA | 4418 |
| ngRNA | 2270 |
| ngRNA | 2274 |
| ngRNA | 2264 |
| ngRNA | 2268 |
| ngRNA | 2275 |
| ngRNA | 2272 |
| ngRNA | 2271 |
| ngRNA | 2265 |
| ngRNA | 2263 |
| ngRNA | 2266 |
| ngRNA | 2273 |
| ngRNA | 4411 |
| ngRNA | 2269 |
| ngRNA | 4416 |
| ngRNA | 2258 |
| ngRNA | 2261 |
| ngRNA | 2260 |
| ngRNA | 2259 |
| ngRNA | 2278 |
| ngRNA | 2284 |
| ngRNA | 2282 |
| ngRNA | 2288 |
| ngRNA | 4420 |
| ngRNA | 2285 |
| ngRNA | 2283 |
| ngRNA | 2280 |
| ngRNA | 4422 |
| ngRNA | 2281 |
| ngRNA | 2287 |
| ngRNA | 2279 |
| ngRNA | 2286 |
| ngRNA | 2289 |
| ngRNA | 2291 |
| ngRNA | 2290 |
| ngRNA | 2292 |

TABLE 17

| Sequence region | SEQ ID |
|---|---|
| pegRNA Spacer | 5206 |
| PBS | 5207 |
| PBS | 5208 |
| PBS | 5209 |
| PBS | 5210 |
| PBS | 5211 |
| PBS | 5212 |
| PBS | 5213 |
| PBS | 5214 |
| PBS | 5215 |
| PBS | 5216 |
| PBS | 5217 |
| RTT | 5218 |
| ngRNA Spacer | 199 |
| ngRNA Spacer | 24 |
| ngRNA Spacer | 20 |
| ngRNA Spacer | 200 |
| ngRNA Spacer | 52 |
| ngRNA Spacer | 21 |
| ngRNA Spacer | 56 |
| ngRNA Spacer | 57 |
| ngRNA Spacer | 51 |
| ngRNA Spacer | 45 |
| ngRNA Spacer | 5219 |
| ngRNA Spacer | 27 |
| ngRNA Spacer | 55 |
| ngRNA Spacer | 737 |
| ngRNA Spacer | 18 |
| ngRNA Spacer | 32 |
| ngRNA Spacer | 72 |
| ngRNA Spacer | 529 |
| ngRNA Spacer | 43 |
| ngRNA Spacer | 23 |
| ngRNA Spacer | 31 |
| ngRNA Spacer | 22 |
| ngRNA Spacer | 34 |
| ngRNA Spacer | 30 |
| ngRNA Spacer | 35 |
| ngRNA Spacer | 46 |
| ngRNA Spacer | 40 |
| ngRNA Spacer | 33 |
| ngRNA Spacer | 39 |
| ngRNA Spacer | 58 |
| ngRNA Spacer | 25 |
| ngRNA Spacer | 28 |
| ngRNA Spacer | 29 |
| ngRNA Spacer | 47 |
| ngRNA Spacer | 5220 |
| ngRNA Spacer | 68 |
| ngRNA Spacer | 37 |
| ngRNA Spacer | 67 |
| ngRNA Spacer | 44 |
| ngRNA Spacer | 19 |
| ngRNA Spacer | 38 |
| ngRNA Spacer | 70 |
| ngRNA Spacer | 42 |
| ngRNA Spacer | 59 |
| ngRNA Spacer | 48 |
| ngRNA Spacer | 36 |
| ngRNA Spacer | 49 |
| ngRNA Spacer | 54 |
| ngRNA Spacer | 5221 |
| ngRNA Spacer | 5222 |
| ngRNA Spacer | 5223 |
| ngRNA Spacer | 5224 |
| ngRNA Spacer | 5225 |
| ngRNA Spacer | 5226 |
| ngRNA Spacer | 5227 |
| ngRNA Spacer | 26 |
| ngRNA Spacer | 53 |
| ngRNA Spacer | 203 |
| ngRNA Spacer | 50 |
| ngRNA | 155 |
| ngRNA | 163 |
| ngRNA | 156 |
| ngRNA | 154 |
| ngRNA | 167 |
| ngRNA | 153 |
| ngRNA | 157 |
| ngRNA | 169 |
| ngRNA | 168 |
| ngRNA | 290 |
| ngRNA | 159 |
| ngRNA | 160 |
| ngRNA | 291 |
| ngRNA | 1501 |
| ngRNA | 161 |
| ngRNA | 681 |
| ngRNA | 164 |
| ngRNA | 162 |
| ngRNA | 166 |
| ngRNA | 165 |
| ngRNA | 158 |
| ngRNA | 171 |
| ngRNA | 170 |
| ngRNA | 173 |
| ngRNA | 293 |
| ngRNA | 179 |
| ngRNA | 1504 |
| ngRNA | 180 |
| ngRNA | 176 |
| ngRNA | 175 |
| ngRNA | 181 |
| ngRNA | 178 |
| ngRNA | 292 |
| ngRNA | 177 |
| ngRNA | 172 |
| ngRNA | 174 |

TABLE 18

| Sequence region | SEQ ID |
|---|---|
| pegRNA Spacer | 5228 |
| PBS | 5229 |
| PBS | 5230 |
| PBS | 5231 |
| PBS | 5232 |
| PBS | 5233 |
| PBS | 5234 |
| PBS | 5235 |
| PBS | 5236 |
| PBS | 5237 |
| PBS | 5238 |
| PBS | 5239 |
| RTT | 5240 |
| RTT | 5241 |
| RTT | 5242 |
| RTT | 5243 |
| RTT | 5244 |
| RTT | 5245 |
| RTT | 5246 |
| RTT | 5247 |
| ngRNA Spacer | 28 |
| ngRNA Spacer | 55 |
| ngRNA Spacer | 35 |
| ngRNA Spacer | 737 |
| ngRNA Spacer | 736 |
| ngRNA Spacer | 529 |
| ngRNA Spacer | 43 |
| ngRNA Spacer | 200 |
| ngRNA Spacer | 203 |
| ngRNA Spacer | 199 |
| ngRNA Spacer | 34 |
| ngRNA Spacer | 5219 |
| ngRNA Spacer | 740 |
| ngRNA Spacer | 33 |
| ngRNA Spacer | 37 |
| ngRNA Spacer | 48 |
| ngRNA Spacer | 20 |
| ngRNA Spacer | 19 |
| ngRNA Spacer | 38 |
| ngRNA Spacer | 46 |
| ngRNA Spacer | 738 |
| ngRNA Spacer | 30 |
| ngRNA Spacer | 50 |
| ngRNA Spacer | 24 |
| ngRNA Spacer | 23 |
| ngRNA Spacer | 47 |
| ngRNA Spacer | 22 |
| ngRNA Spacer | 29 |
| ngRNA Spacer | 70 |
| ngRNA Spacer | 58 |
| ngRNA Spacer | 52 |
| ngRNA Spacer | 51 |
| ngRNA Spacer | 49 |
| ngRNA Spacer | 45 |
| ngRNA Spacer | 68 |
| ngRNA Spacer | 59 |
| ngRNA Spacer | 31 |
| ngRNA Spacer | 18 |
| ngRNA Spacer | 67 |
| ngRNA Spacer | 53 |
| ngRNA Spacer | 5220 |
| ngRNA Spacer | 21 |
| ngRNA Spacer | 26 |
| ngRNA Spacer | 36 |
| ngRNA Spacer | 56 |
| ngRNA Spacer | 32 |
| ngRNA Spacer | 44 |
| ngRNA Spacer | 5221 |
| ngRNA Spacer | 739 |
| ngRNA Spacer | 39 |
| ngRNA Spacer | 40 |
| ngRNA Spacer | 42 |
| ngRNA Spacer | 72 |
| ngRNA Spacer | 54 |
| ngRNA Spacer | 57 |
| ngRNA Spacer | 5227 |
| ngRNA Spacer | 27 |
| ngRNA Spacer | 5225 |
| ngRNA Spacer | 5224 |
| ngRNA Spacer | 5226 |
| ngRNA Spacer | 5223 |
| ngRNA Spacer | 5222 |
| ngRNA Spacer | 25 |
| ngRNA | 162 |
| ngRNA | 164 |
| ngRNA | 160 |
| ngRNA | 1503 |
| ngRNA | 681 |
| ngRNA | 154 |
| ngRNA | 155 |
| ngRNA | 156 |
| ngRNA | 290 |
| ngRNA | 153 |
| ngRNA | 166 |
| ngRNA | 1501 |
| ngRNA | 291 |
| ngRNA | 158 |
| ngRNA | 163 |
| ngRNA | 157 |
| ngRNA | 169 |
| ngRNA | 167 |
| ngRNA | 168 |
| ngRNA | 159 |
| ngRNA | 161 |
| ngRNA | 1502 |
| ngRNA | 165 |
| ngRNA | 1504 |
| ngRNA | 180 |
| ngRNA | 292 |
| ngRNA | 178 |
| ngRNA | 179 |
| ngRNA | 170 |
| ngRNA | 172 |
| ngRNA | 173 |
| ngRNA | 177 |
| ngRNA | 293 |
| ngRNA | 176 |
| ngRNA | 174 |
| ngRNA | 175 |
| ngRNA | 181 |
| ngRNA | 171 |

TABLE 19

| Sequence region | SEQ ID |
|---|---|
| pegRNA Spacer | 5248 |
| PBS | 5249 |
| PBS | 5250 |
| PBS | 5251 |
| PBS | 5252 |
| PBS | 5253 |
| PBS | 5254 |
| PBS | 5255 |
| PBS | 5256 |
| PBS | 5257 |
| PBS | 5258 |
| PBS | 5259 |
| RTT | 5260 |
| RTT | 5261 |
| RTT | 5262 |
| RTT | 5263 |
| RTT | 5264 |
| RTT | 5265 |
| RTT | 5266 |
| RTT | 5267 |
| RTT | 5268 |
| RTT | 5269 |
| RTT | 5270 |
| RTT | 5271 |
| RTT | 5272 |
| RTT | 5273 |
| RTT | 5274 |
| RTT | 5275 |
| RTT | 5276 |
| RTT | 5277 |
| RTT | 5278 |
| RTT | 5279 |
| ngRNA Spacer | 40 |
| ngRNA Spacer | 738 |
| ngRNA Spacer | 529 |
| ngRNA Spacer | 44 |
| ngRNA Spacer | 29 |
| ngRNA Spacer | 26 |
| ngRNA Spacer | 42 |
| ngRNA Spacer | 5280 |
| ngRNA Spacer | 30 |
| ngRNA Spacer | 50 |
| ngRNA Spacer | 46 |
| ngRNA Spacer | 5219 |
| ngRNA Spacer | 25 |
| ngRNA Spacer | 52 |
| ngRNA Spacer | 737 |
| ngRNA Spacer | 55 |
| ngRNA Spacer | 49 |
| ngRNA Spacer | 48 |
| ngRNA Spacer | 5281 |
| ngRNA Spacer | 740 |
| ngRNA Spacer | 739 |
| ngRNA Spacer | 57 |
| ngRNA Spacer | 203 |
| ngRNA Spacer | 43 |
| ngRNA Spacer | 200 |
| ngRNA Spacer | 33 |
| ngRNA Spacer | 24 |
| ngRNA Spacer | 54 |
| ngRNA Spacer | 45 |
| ngRNA Spacer | 21 |
| ngRNA Spacer | 47 |
| ngRNA Spacer | 37 |
| ngRNA Spacer | 19 |
| ngRNA Spacer | 58 |
| ngRNA Spacer | 32 |
| ngRNA Spacer | 59 |
| ngRNA Spacer | 5220 |
| ngRNA Spacer | 56 |
| ngRNA Spacer | 736 |
| ngRNA Spacer | 67 |
| ngRNA Spacer | 28 |
| ngRNA Spacer | 39 |
| ngRNA Spacer | 20 |
| ngRNA Spacer | 70 |
| ngRNA Spacer | 199 |
| ngRNA Spacer | 22 |
| ngRNA Spacer | 68 |
| ngRNA Spacer | 5221 |
| ngRNA Spacer | 18 |
| ngRNA Spacer | 36 |
| ngRNA Spacer | 27 |
| ngRNA Spacer | 31 |
| ngRNA Spacer | 23 |
| ngRNA Spacer | 53 |
| ngRNA Spacer | 35 |
| ngRNA Spacer | 38 |
| ngRNA Spacer | 34 |
| ngRNA Spacer | 72 |
| ngRNA Spacer | 5227 |
| ngRNA Spacer | 5225 |
| ngRNA Spacer | 5224 |
| ngRNA Spacer | 5226 |
| ngRNA Spacer | 5223 |
| ngRNA Spacer | 51 |
| ngRNA Spacer | 5222 |
| ngRNA | 164 |
| ngRNA | 162 |
| ngRNA | 160 |
| ngRNA | 1503 |
| ngRNA | 161 |
| ngRNA | 153 |
| ngRNA | 1502 |
| ngRNA | 290 |
| ngRNA | 168 |
| ngRNA | 167 |
| ngRNA | 169 |
| ngRNA | 157 |
| ngRNA | 165 |
| ngRNA | 158 |
| ngRNA | 166 |
| ngRNA | 291 |
| ngRNA | 154 |
| ngRNA | 156 |
| ngRNA | 163 |
| ngRNA | 159 |
| ngRNA | 681 |
| ngRNA | 155 |
| ngRNA | 1501 |
| ngRNA | 174 |
| ngRNA | 176 |
| ngRNA | 181 |
| ngRNA | 179 |
| ngRNA | 175 |
| ngRNA | 292 |
| ngRNA | 1504 |
| ngRNA | 172 |
| ngRNA | 171 |
| ngRNA | 293 |
| ngRNA | 170 |
| ngRNA | 173 |
| ngRNA | 177 |
| ngRNA | 178 |
| ngRNA | 180 |

TABLE 20

| Sequence region | SEQ ID |
|---|---|
| pegRNA Spacer | 5282 |
| PBS | 5283 |
| PBS | 5284 |
| PBS | 5285 |
| PBS | 5286 |
| PBS | 5287 |
| PBS | 5288 |
| PBS | 5289 |
| PBS | 5290 |
| PBS | 5291 |
| PBS | 5292 |
| PBS | 5293 |
| RTT | 5294 |
| RTT | 5295 |
| RTT | 5296 |
| RTT | 5297 |
| RTT | 5298 |
| RTT | 5299 |
| RTT | 5300 |
| RTT | 5301 |
| RTT | 5302 |
| ngRNA Spacer | 202 |
| ngRNA Spacer | 5303 |
| ngRNA Spacer | 337 |
| ngRNA Spacer | 5304 |
| ngRNA Spacer | 5305 |
| ngRNA Spacer | 209 |
| ngRNA Spacer | 205 |
| ngRNA Spacer | 5306 |
| ngRNA Spacer | 204 |
| ngRNA Spacer | 740 |
| ngRNA Spacer | 70 |
| ngRNA Spacer | 33 |
| ngRNA Spacer | 35 |
| ngRNA Spacer | 206 |
| ngRNA Spacer | 50 |
| ngRNA Spacer | 5307 |
| ngRNA Spacer | 201 |
| ngRNA Spacer | 27 |
| ngRNA Spacer | 68 |
| ngRNA Spacer | 5308 |
| ngRNA Spacer | 30 |
| ngRNA Spacer | 5309 |
| ngRNA Spacer | 5310 |
| ngRNA Spacer | 200 |
| ngRNA Spacer | 736 |
| ngRNA Spacer | 207 |
| ngRNA Spacer | 208 |
| ngRNA Spacer | 5311 |
| ngRNA Spacer | 5312 |
| ngRNA | 1503 |
| ngRNA | 153 |
| ngRNA | 291 |
| ngRNA | 154 |
| ngRNA | 155 |
| ngRNA | 167 |
| ngRNA | 157 |
| ngRNA | 165 |
| ngRNA | 163 |
| ngRNA | 166 |
| ngRNA | 1501 |
| ngRNA | 160 |
| ngRNA | 162 |
| ngRNA | 173 |
| ngRNA | 172 |
| ngRNA | 171 |
| ngRNA | 170 |
| ngRNA | 178 |
| ngRNA | 1504 |
| ngRNA | 177 |
| ngRNA | 180 |
| ngRNA | 292 |
| ngRNA | 181 |

TABLE 21

| Sequence region | SEQ ID |
|---|---|
| pegRNA Spacer | 5313 |
| PBS | 5314 |
| PBS | 5315 |
| PBS | 5316 |
| PBS | 5317 |
| PBS | 5318 |
| PBS | 5319 |
| PBS | 5320 |
| PBS | 5321 |
| PBS | 5322 |
| PBS | 5323 |
| PBS | 5324 |
| RTT | 5325 |
| RTT | 5326 |
| RTT | 5327 |
| RTT | 5328 |
| RTT | 5329 |
| RTT | 5330 |
| RTT | 5331 |
| RTT | 5332 |
| RTT | 5333 |
| RTT | 5334 |
| RTT | 5335 |
| RTT | 5336 |
| RTT | 5337 |
| RTT | 5338 |
| ngRNA Spacer | 5312 |
| ngRNA Spacer | 5310 |
| ngRNA Spacer | 5308 |
| ngRNA Spacer | 207 |
| ngRNA Spacer | 5309 |
| ngRNA Spacer | 208 |
| ngRNA Spacer | 5303 |
| ngRNA Spacer | 5305 |
| ngRNA Spacer | 5311 |
| ngRNA Spacer | 201 |
| ngRNA Spacer | 5339 |
| ngRNA Spacer | 206 |
| ngRNA Spacer | 337 |
| ngRNA Spacer | 5307 |
| ngRNA | 160 |
| ngRNA | 165 |
| ngRNA | 166 |
| ngRNA | 155 |
| ngRNA | 291 |
| ngRNA | 171 |
| ngRNA | 177 |
| ngRNA | 172 |
| ngRNA | 292 |

TABLE 22

| Sequence region | SEQ ID |
|---|---|
| pegRNA Spacer | 5340 |
| PBS | 5341 |
| PBS | 5342 |
| PBS | 5343 |
| PBS | 5344 |
| PBS | 5345 |
| PBS | 5346 |
| PBS | 5347 |
| PBS | 5348 |
| PBS | 5349 |
| PBS | 5350 |
| PBS | 5351 |
| RTT | 5352 |
| RTT | 5353 |
| RTT | 5354 |
| RTT | 5355 |
| RTT | 5356 |
| RTT | 5357 |
| RTT | 5358 |
| RTT | 5359 |
| RTT | 5360 |
| RTT | 5361 |
| RTT | 5362 |
| RTT | 5363 |
| RTT | 5364 |
| RTT | 5365 |
| RTT | 5366 |
| RTT | 5367 |
| RTT | 5368 |
| ngRNA Spacer | 337 |
| ngRNA Spacer | 207 |
| ngRNA Spacer | 5305 |
| ngRNA Spacer | 5303 |
| ngRNA Spacer | 208 |
| ngRNA Spacer | 5307 |
| ngRNA Spacer | 5312 |
| ngRNA Spacer | 5339 |
| ngRNA Spacer | 206 |
| ngRNA Spacer | 5308 |
| ngRNA Spacer | 201 |
| ngRNA Spacer | 5311 |
| ngRNA Spacer | 5310 |
| ngRNA Spacer | 5309 |
| ngRNA | 160 |
| ngRNA | 165 |
| ngRNA | 166 |
| ngRNA | 155 |
| ngRNA | 291 |
| ngRNA | 171 |
| ngRNA | 292 |
| ngRNA | 172 |
| ngRNA | 177 |

TABLE 23

| Sequence region | SEQ ID |
|---|---|
| pegRNA Spacer | 5369 |
| PBS | 5370 |
| PBS | 5371 |
| PBS | 5372 |
| PBS | 5373 |
| PBS | 5374 |
| PBS | 5375 |
| PBS | 5376 |
| PBS | 5377 |
| PBS | 5378 |
| PBS | 5379 |
| PBS | 5380 |
| RTT | 5381 |
| RTT | 5382 |
| RTT | 5383 |
| RTT | 5384 |
| RTT | 5385 |
| RTT | 5386 |
| RTT | 5387 |
| RTT | 5388 |
| RTT | 5389 |
| RTT | 5390 |
| RTT | 5391 |
| RTT | 5392 |
| RTT | 5393 |
| RTT | 5394 |
| RTT | 5395 |
| RTT | 5396 |
| RTT | 5397 |
| RTT | 5398 |
| RTT | 5399 |
| RTT | 5400 |
| RTT | 5401 |
| ngRNA Spacer | 2434 |
| ngRNA Spacer | 2080 |
| ngRNA Spacer | 5402 |
| ngRNA Spacer | 2430 |
| ngRNA Spacer | 2436 |
| ngRNA Spacer | 5403 |
| ngRNA Spacer | 5404 |
| ngRNA Spacer | 2425 |
| ngRNA Spacer | 2052 |
| ngRNA Spacer | 2424 |
| ngRNA Spacer | 2088 |
| ngRNA Spacer | 5405 |
| ngRNA Spacer | 2426 |
| ngRNA Spacer | 2443 |
| ngRNA Spacer | 2427 |
| ngRNA Spacer | 2440 |
| ngRNA Spacer | 2048 |
| ngRNA Spacer | 2089 |
| ngRNA Spacer | 2439 |
| ngRNA Spacer | 2429 |
| ngRNA Spacer | 2435 |
| ngRNA Spacer | 2428 |
| ngRNA Spacer | 2444 |
| ngRNA Spacer | 2433 |
| ngRNA Spacer | 2070 |
| ngRNA Spacer | 2431 |
| ngRNA Spacer | 2086 |
| ngRNA Spacer | 2438 |
| ngRNA Spacer | 2432 |
| ngRNA Spacer | 2085 |
| ngRNA Spacer | 2423 |
| ngRNA Spacer | 2091 |
| ngRNA | 4412 |
| ngRNA | 4416 |
| ngRNA | 2270 |
| ngRNA | 2274 |
| ngRNA | 2262 |
| ngRNA | 2275 |
| ngRNA | 2272 |
| ngRNA | 4413 |
| ngRNA | 4415 |
| ngRNA | 2276 |
| ngRNA | 4417 |
| ngRNA | 2259 |
| ngRNA | 2260 |
| ngRNA | 2261 |
| ngRNA | 2257 |
| ngRNA | 4411 |
| ngRNA | 2264 |
| ngRNA | 2278 |
| ngRNA | 2282 |
| ngRNA | 2285 |
| ngRNA | 2283 |
| ngRNA | 2284 |
| ngRNA | 2288 |
| ngRNA | 4421 |
| ngRNA | 4419 |
| ngRNA | 2280 |
| ngRNA | 4420 |
| ngRNA | 2292 |
| ngRNA | 4424 |

TABLE 24

| Sequence region | SEQ ID |
|---|---|
| pegRNA Spacer | 5406 |
| PBS | 5407 |
| PBS | 5408 |
| PBS | 5409 |
| PBS | 5410 |
| PBS | 5411 |
| PBS | 5412 |
| PBS | 5413 |
| PBS | 5414 |
| PBS | 5415 |
| PBS | 5416 |
| PBS | 5417 |
| RTT | 5418 |
| RTT | 5419 |
| RTT | 5420 |
| RTT | 5421 |
| RTT | 5422 |
| ngRNA Spacer | 736 |
| ngRNA Spacer | 55 |
| ngRNA Spacer | 737 |
| ngRNA Spacer | 51 |
| ngRNA Spacer | 28 |
| ngRNA Spacer | 199 |
| ngRNA Spacer | 529 |
| ngRNA Spacer | 70 |
| ngRNA Spacer | 68 |
| ngRNA Spacer | 38 |
| ngRNA Spacer | 740 |
| ngRNA Spacer | 37 |
| ngRNA Spacer | 18 |
| ngRNA Spacer | 57 |
| ngRNA Spacer | 20 |
| ngRNA Spacer | 58 |
| ngRNA Spacer | 54 |
| ngRNA Spacer | 56 |
| ngRNA Spacer | 29 |
| ngRNA Spacer | 67 |
| ngRNA Spacer | 31 |
| ngRNA Spacer | 35 |
| ngRNA Spacer | 33 |
| ngRNA Spacer | 25 |
| ngRNA Spacer | 44 |
| ngRNA Spacer | 21 |
| ngRNA Spacer | 52 |
| ngRNA Spacer | 39 |
| ngRNA Spacer | 34 |
| ngRNA Spacer | 36 |
| ngRNA Spacer | 27 |
| ngRNA Spacer | 32 |
| ngRNA Spacer | 203 |
| ngRNA Spacer | 23 |
| ngRNA Spacer | 48 |
| ngRNA Spacer | 22 |
| ngRNA Spacer | 47 |
| ngRNA Spacer | 40 |
| ngRNA Spacer | 45 |
| ngRNA Spacer | 43 |
| ngRNA Spacer | 42 |
| ngRNA Spacer | 49 |
| ngRNA Spacer | 24 |
| ngRNA Spacer | 26 |
| ngRNA Spacer | 72 |
| ngRNA Spacer | 19 |
| ngRNA Spacer | 50 |
| ngRNA Spacer | 53 |
| ngRNA Spacer | 739 |
| ngRNA Spacer | 200 |
| ngRNA Spacer | 59 |
| ngRNA Spacer | 30 |
| ngRNA Spacer | 46 |
| ngRNA | 162 |
| ngRNA | 681 |
| ngRNA | 154 |
| ngRNA | 161 |
| ngRNA | 290 |
| ngRNA | 156 |
| ngRNA | 155 |
| ngRNA | 160 |
| ngRNA | 159 |
| ngRNA | 168 |
| ngRNA | 167 |
| ngRNA | 169 |
| ngRNA | 1503 |
| ngRNA | 165 |
| ngRNA | 158 |
| ngRNA | 166 |
| ngRNA | 1501 |
| ngRNA | 291 |
| ngRNA | 153 |
| ngRNA | 157 |
| ngRNA | 164 |
| ngRNA | 163 |
| ngRNA | 176 |
| ngRNA | 170 |
| ngRNA | 171 |
| ngRNA | 175 |
| ngRNA | 181 |
| ngRNA | 172 |
| ngRNA | 179 |
| ngRNA | 173 |
| ngRNA | 292 |
| ngRNA | 178 |
| ngRNA | 180 |
| ngRNA | 1504 |
| ngRNA | 293 |
| ngRNA | 177 |
| ngRNA | 174 |

TABLE 25

| Sequence region | SEQ ID |
|---|---|
| pegRNA Spacer | 5423 |
| PBS | 5424 |
| PBS | 5425 |
| PBS | 5426 |
| PBS | 5427 |
| PBS | 5428 |
| PBS | 5429 |
| PBS | 5430 |
| PBS | 5431 |
| PBS | 5432 |
| PBS | 5433 |
| PBS | 5434 |
| RTT | 5435 |
| RTT | 5436 |
| RTT | 5437 |
| RTT | 5438 |
| RTT | 5439 |
| RTT | 5440 |
| RTT | 5441 |
| RTT | 5442 |
| RTT | 5443 |
| RTT | 5444 |
| RTT | 5445 |
| ngRNA Spacer | 200 |
| ngRNA Spacer | 53 |
| ngRNA Spacer | 736 |
| ngRNA Spacer | 49 |
| ngRNA Spacer | 23 |
| ngRNA Spacer | 740 |
| ngRNA Spacer | 30 |
| ngRNA Spacer | 203 |
| ngRNA Spacer | 32 |
| ngRNA Spacer | 5280 |
| ngRNA Spacer | 22 |
| ngRNA Spacer | 35 |
| ngRNA Spacer | 45 |
| ngRNA Spacer | 26 |
| ngRNA Spacer | 70 |
| ngRNA Spacer | 737 |
| ngRNA Spacer | 59 |
| ngRNA Spacer | 44 |
| ngRNA Spacer | 46 |
| ngRNA Spacer | 37 |
| ngRNA Spacer | 56 |
| ngRNA Spacer | 58 |
| ngRNA Spacer | 20 |
| ngRNA Spacer | 21 |
| ngRNA Spacer | 67 |
| ngRNA Spacer | 38 |
| ngRNA Spacer | 738 |
| ngRNA Spacer | 47 |
| ngRNA Spacer | 34 |
| ngRNA Spacer | 68 |
| ngRNA Spacer | 52 |
| ngRNA Spacer | 54 |
| ngRNA Spacer | 51 |
| ngRNA Spacer | 739 |
| ngRNA Spacer | 43 |
| ngRNA Spacer | 18 |
| ngRNA Spacer | 42 |
| ngRNA Spacer | 39 |
| ngRNA Spacer | 72 |
| ngRNA Spacer | 57 |
| ngRNA Spacer | 55 |
| ngRNA Spacer | 25 |
| ngRNA Spacer | 27 |
| ngRNA Spacer | 33 |
| ngRNA Spacer | 29 |
| ngRNA Spacer | 31 |
| ngRNA Spacer | 40 |
| ngRNA Spacer | 50 |
| ngRNA Spacer | 19 |
| ngRNA Spacer | 24 |
| ngRNA Spacer | 529 |
| ngRNA Spacer | 28 |
| ngRNA Spacer | 36 |
| ngRNA Spacer | 48 |
| ngRNA Spacer | 199 |
| ngRNA | 681 |
| ngRNA | 154 |
| ngRNA | 158 |
| ngRNA | 1503 |
| ngRNA | 161 |
| ngRNA | 159 |
| ngRNA | 156 |
| ngRNA | 164 |
| ngRNA | 160 |
| ngRNA | 290 |
| ngRNA | 168 |
| ngRNA | 167 |
| ngRNA | 155 |
| ngRNA | 162 |
| ngRNA | 169 |
| ngRNA | 163 |
| ngRNA | 166 |
| ngRNA | 153 |
| ngRNA | 1501 |
| ngRNA | 291 |
| ngRNA | 157 |
| ngRNA | 1502 |
| ngRNA | 165 |
| ngRNA | 181 |
| ngRNA | 170 |
| ngRNA | 171 |
| ngRNA | 174 |
| ngRNA | 179 |
| ngRNA | 172 |
| ngRNA | 175 |
| ngRNA | 173 |
| ngRNA | 292 |
| ngRNA | 178 |
| ngRNA | 180 |
| ngRNA | 176 |
| ngRNA | 293 |
| ngRNA | 1504 |
| ngRNA | 177 |

TABLE 26

| Sequence region | SEQ ID |
|---|---|
| pegRNA Spacer | 5446 |
| PBS | 5447 |
| PBS | 5448 |
| PBS | 5449 |
| PBS | 5450 |
| PBS | 5451 |
| PBS | 5452 |
| PBS | 5453 |
| PBS | 5454 |
| PBS | 5455 |
| PBS | 5456 |
| PBS | 5457 |
| RTT | 5458 |
| RTT | 5459 |
| RTT | 5460 |
| RTT | 5461 |
| RTT | 5462 |
| RTT | 5463 |
| RTT | 5464 |
| RTT | 5465 |
| RTT | 5466 |
| RTT | 5467 |
| RTT | 5468 |
| RTT | 5469 |
| RTT | 5470 |
| RTT | 5471 |
| RTT | 5472 |
| ngRNA Spacer | 59 |
| ngRNA Spacer | 25 |
| ngRNA Spacer | 740 |
| ngRNA Spacer | 28 |
| ngRNA Spacer | 22 |
| ngRNA Spacer | 54 |
| ngRNA Spacer | 21 |
| ngRNA Spacer | 5280 |
| ngRNA Spacer | 5281 |
| ngRNA Spacer | 56 |
| ngRNA Spacer | 52 |
| ngRNA Spacer | 738 |
| ngRNA Spacer | 34 |
| ngRNA Spacer | 38 |
| ngRNA Spacer | 24 |
| ngRNA Spacer | 49 |
| ngRNA Spacer | 739 |
| ngRNA Spacer | 55 |
| ngRNA Spacer | 43 |
| ngRNA Spacer | 58 |
| ngRNA Spacer | 46 |
| ngRNA Spacer | 737 |
| ngRNA Spacer | 37 |
| ngRNA Spacer | 40 |
| ngRNA Spacer | 31 |
| ngRNA Spacer | 70 |
| ngRNA Spacer | 47 |
| ngRNA Spacer | 33 |
| ngRNA Spacer | 736 |
| ngRNA Spacer | 203 |
| ngRNA Spacer | 51 |
| ngRNA Spacer | 68 |
| ngRNA Spacer | 50 |
| ngRNA Spacer | 72 |
| ngRNA Spacer | 29 |
| ngRNA Spacer | 20 |
| ngRNA Spacer | 36 |
| ngRNA Spacer | 30 |
| ngRNA Spacer | 529 |
| ngRNA Spacer | 18 |
| ngRNA Spacer | 27 |
| ngRNA Spacer | 48 |
| ngRNA Spacer | 199 |
| ngRNA Spacer | 35 |
| ngRNA Spacer | 57 |
| ngRNA Spacer | 200 |
| ngRNA Spacer | 53 |
| ngRNA Spacer | 39 |
| ngRNA Spacer | 23 |
| ngRNA Spacer | 201 |
| ngRNA Spacer | 19 |
| ngRNA Spacer | 44 |
| ngRNA Spacer | 32 |
| ngRNA Spacer | 26 |
| ngRNA Spacer | 67 |
| ngRNA Spacer | 45 |
| ngRNA Spacer | 42 |
| ngRNA | 158 |
| ngRNA | 154 |
| ngRNA | 164 |
| ngRNA | 1503 |
| ngRNA | 161 |
| ngRNA | 155 |
| ngRNA | 156 |
| ngRNA | 1502 |
| ngRNA | 160 |
| ngRNA | 159 |
| ngRNA | 290 |
| ngRNA | 168 |
| ngRNA | 167 |
| ngRNA | 162 |
| ngRNA | 163 |
| ngRNA | 165 |
| ngRNA | 166 |
| ngRNA | 1501 |
| ngRNA | 153 |
| ngRNA | 29 |
| ngRNA | 169 |
| ngRNA | 681 |
| ngRNA | 157 |
| ngRNA | 181 |
| ngRNA | 170 |
| ngRNA | 177 |
| ngRNA | 174 |
| ngRNA | 179 |
| ngRNA | 180 |
| ngRNA | 175 |
| ngRNA | 173 |
| ngRNA | 292 |
| ngRNA | 178 |
| ngRNA | 172 |
| ngRNA | 176 |
| ngRNA | 293 |
| ngRNA | 1504 |
| ngRNA | 171 |

TABLE 27

| Sequence region | SEQ ID |
|---|---|
| pegRNA Spacer | 5473 |
| PBS | 5474 |
| PBS | 5475 |
| PBS | 5476 |
| PBS | 5477 |
| PBS | 5478 |
| PBS | 5479 |
| PBS | 5480 |
| PBS | 5481 |
| PBS | 5482 |
| PBS | 5483 |
| PBS | 5484 |
| RTT | 5485 |
| RTT | 5486 |
| RTT | 5487 |
| RTT | 5488 |
| RTT | 5489 |
| RTT | 5490 |
| RTT | 5491 |
| RTT | 5492 |
| RTT | 5493 |
| RTT | 5494 |
| RTT | 5495 |
| RTT | 5496 |
| RTT | 5497 |
| RTT | 5498 |
| RTT | 5499 |
| RTT | 5500 |
| RTT | 5501 |
| RTT | 5502 |
| ngRNA Spacer | 200 |
| ngRNA Spacer | 737 |
| ngRNA Spacer | 28 |
| ngRNA Spacer | 739 |
| ngRNA Spacer | 45 |
| ngRNA Spacer | 46 |
| ngRNA Spacer | 30 |
| ngRNA Spacer | 50 |
| ngRNA Spacer | 29 |
| ngRNA Spacer | 22 |
| ngRNA Spacer | 47 |
| ngRNA Spacer | 736 |
| ngRNA Spacer | 26 |
| ngRNA Spacer | 58 |
| ngRNA Spacer | 203 |
| ngRNA Spacer | 18 |
| ngRNA Spacer | 59 |
| ngRNA Spacer | 39 |
| ngRNA Spacer | 5280 |
| ngRNA Spacer | 68 |
| ngRNA Spacer | 43 |
| ngRNA Spacer | 54 |
| ngRNA Spacer | 33 |
| ngRNA Spacer | 740 |
| ngRNA Spacer | 34 |
| ngRNA Spacer | 55 |
| ngRNA Spacer | 49 |
| ngRNA Spacer | 51 |
| ngRNA Spacer | 19 |
| ngRNA Spacer | 42 |
| ngRNA Spacer | 67 |
| ngRNA Spacer | 57 |
| ngRNA Spacer | 36 |
| ngRNA Spacer | 23 |
| ngRNA Spacer | 21 |
| ngRNA Spacer | 738 |
| ngRNA Spacer | 38 |
| ngRNA Spacer | 529 |
| ngRNA Spacer | 31 |
| ngRNA Spacer | 48 |
| ngRNA Spacer | 53 |
| ngRNA Spacer | 35 |
| ngRNA Spacer | 5281 |
| ngRNA Spacer | 25 |
| ngRNA Spacer | 52 |
| ngRNA Spacer | 27 |
| ngRNA Spacer | 70 |
| ngRNA Spacer | 40 |
| ngRNA Spacer | 32 |
| ngRNA Spacer | 20 |
| ngRNA Spacer | 24 |
| ngRNA Spacer | 37 |
| ngRNA Spacer | 199 |
| ngRNA Spacer | 56 |
| ngRNA Spacer | 72 |
| ngRNA Spacer | 44 |
| ngRNA | 162 |
| ngRNA | 161 |
| ngRNA | 154 |
| ngRNA | 164 |
| ngRNA | 1503 |
| ngRNA | 155 |
| ngRNA | 681 |
| ngRNA | 158 |
| ngRNA | 1502 |
| ngRNA | 160 |
| ngRNA | 159 |
| ngRNA | 290 |
| ngRNA | 168 |
| ngRNA | 156 |
| ngRNA | 167 |
| ngRNA | 157 |
| ngRNA | 163 |
| ngRNA | 166 |
| ngRNA | 153 |
| ngRNA | 1501 |
| ngRNA | 291 |
| ngRNA | 169 |
| ngRNA | 165 |
| ngRNA | 175 |
| ngRNA | 1504 |
| ngRNA | 176 |
| ngRNA | 179 |
| ngRNA | 177 |
| ngRNA | 170 |
| ngRNA | 180 |
| ngRNA | 171 |
| ngRNA | 173 |
| ngRNA | 293 |
| ngRNA | 172 |
| ngRNA | 174 |
| ngRNA | 178 |
| ngRNA | 292 |
| ngRNA | 181 |

TABLE 28

| Sequence region | SEQ ID |
|---|---|
| pegRNA Spacer | 5503 |
| PBS | 5504 |
| PBS | 5505 |
| PBS | 5506 |
| PBS | 5507 |
| PBS | 5508 |
| PBS | 5509 |
| PBS | 5510 |
| PBS | 5511 |
| PBS | 5512 |
| PBS | 5513 |
| PBS | 5514 |
| RTT | 5515 |
| RTT | 5516 |
| RTT | 5517 |
| RTT | 5518 |
| RTT | 5519 |
| RTT | 5520 |
| RTT | 5521 |
| RTT | 5522 |
| RTT | 5523 |
| RTT | 5524 |
| RTT | 5525 |
| RTT | 5526 |
| RTT | 5527 |
| RTT | 5528 |
| RTT | 5529 |
| RTT | 5530 |
| RTT | 5531 |
| RTT | 5532 |
| RTT | 5533 |
| RTT | 5534 |
| RTT | 5535 |
| ngRNA Spacer | 2052 |
| ngRNA Spacer | 2437 |
| ngRNA Spacer | 2096 |
| ngRNA Spacer | 2074 |
| ngRNA Spacer | 2066 |
| ngRNA Spacer | 2065 |
| ngRNA Spacer | 2094 |
| ngRNA Spacer | 2090 |
| ngRNA Spacer | 2444 |
| ngRNA Spacer | 2073 |
| ngRNA Spacer | 2077 |
| ngRNA Spacer | 2063 |
| ngRNA Spacer | 2046 |
| ngRNA Spacer | 2064 |
| ngRNA Spacer | 2089 |
| ngRNA Spacer | 2060 |
| ngRNA Spacer | 2091 |
| ngRNA Spacer | 2086 |
| ngRNA Spacer | 2093 |
| ngRNA Spacer | 2079 |
| ngRNA Spacer | 2054 |
| ngRNA Spacer | 2049 |
| ngRNA Spacer | 2443 |
| ngRNA Spacer | 2057 |
| ngRNA Spacer | 2069 |
| ngRNA Spacer | 2085 |
| ngRNA Spacer | 2059 |
| ngRNA Spacer | 2047 |
| ngRNA Spacer | 2071 |
| ngRNA Spacer | 2081 |
| ngRNA Spacer | 2072 |
| ngRNA Spacer | 2048 |
| ngRNA Spacer | 2068 |
| ngRNA Spacer | 2045 |
| ngRNA Spacer | 2078 |
| ngRNA Spacer | 5536 |
| ngRNA Spacer | 2088 |
| ngRNA Spacer | 2055 |
| ngRNA Spacer | 2084 |
| ngRNA Spacer | 2050 |
| ngRNA Spacer | 2092 |
| ngRNA Spacer | 2062 |
| ngRNA Spacer | 2087 |
| ngRNA Spacer | 2082 |
| ngRNA Spacer | 2061 |
| ngRNA Spacer | 2080 |
| ngRNA Spacer | 2095 |
| ngRNA Spacer | 2056 |
| ngRNA Spacer | 2083 |
| ngRNA Spacer | 2442 |
| ngRNA Spacer | 2075 |
| ngRNA Spacer | 2058 |
| ngRNA Spacer | 2067 |
| ngRNA Spacer | 2439 |
| ngRNA Spacer | 2051 |
| ngRNA Spacer | 2070 |
| ngRNA Spacer | 2076 |
| ngRNA Spacer | 2053 |
| ngRNA | 2270 |
| ngRNA | 2267 |
| ngRNA | 4416 |
| ngRNA | 2268 |
| ngRNA | 2263 |
| ngRNA | 2262 |
| ngRNA | 2265 |
| ngRNA | 2272 |
| ngRNA | 2275 |
| ngRNA | 4411 |
| ngRNA | 2276 |
| ngRNA | 2266 |
| ngRNA | 2258 |
| ngRNA | 2271 |
| ngRNA | 2261 |
| ngRNA | 2259 |
| ngRNA | 2274 |
| ngRNA | 2260 |
| ngRNA | 2257 |
| ngRNA | 2277 |
| ngRNA | 4418 |
| ngRNA | 2273 |
| ngRNA | 2264 |
| ngRNA | 2269 |
| ngRNA | 2279 |
| ngRNA | 2281 |
| ngRNA | 2285 |
| ngRNA | 2283 |
| ngRNA | 4420 |
| ngRNA | 2280 |
| ngRNA | 2286 |
| ngRNA | 2282 |
| ngRNA | 2284 |
| ngRNA | 2278 |
| ngRNA | 2288 |
| ngRNA | 2287 |
| ngRNA | 4422 |
| ngRNA | 2289 |
| ngRNA | 2291 |
| ngRNA | 2290 |
| ngRNA | 2292 |

TABLE 29

| Sequence region | SEQ ID |
|---|---|
| pegRNA Spacer | 5537 |
| PBS | 5538 |
| PBS | 5539 |
| PBS | 5540 |
| PBS | 5541 |
| PBS | 5542 |
| PBS | 5543 |
| PBS | 5544 |
| PBS | 5545 |
| PBS | 5546 |
| PBS | 5547 |
| PBS | 5548 |
| RTT | 5549 |
| RTT | 5550 |
| RTT | 5551 |
| RTT | 5552 |
| RTT | 5553 |
| RTT | 5554 |
| ngRNA Spacer | 70 |
| ngRNA Spacer | 30 |
| ngRNA Spacer | 204 |
| ngRNA Spacer | 68 |
| ngRNA Spacer | 209 |
| ngRNA Spacer | 206 |
| ngRNA Spacer | 208 |
| ngRNA Spacer | 201 |
| ngRNA Spacer | 35 |
| ngRNA Spacer | 337 |
| ngRNA Spacer | 27 |
| ngRNA Spacer | 202 |
| ngRNA Spacer | 200 |
| ngRNA Spacer | 736 |
| ngRNA Spacer | 33 |
| ngRNA Spacer | 5306 |
| ngRNA Spacer | 50 |
| ngRNA Spacer | 205 |
| ngRNA Spacer | 207 |
| ngRNA Spacer | 740 |
| ngRNA | 1503 |
| ngRNA | 153 |
| ngRNA | 157 |
| ngRNA | 162 |
| ngRNA | 167 |
| ngRNA | 165 |
| ngRNA | 291 |
| ngRNA | 163 |
| ngRNA | 166 |
| ngRNA | 1501 |
| ngRNA | 160 |
| ngRNA | 154 |
| ngRNA | 181 |
| ngRNA | 171 |
| ngRNA | 1504 |
| ngRNA | 292 |
| ngRNA | 173 |
| ngRNA | 170 |
| ngRNA | 172 |
| ngRNA | 180 |
| ngRNA | 178 |
| ngRNA | 177 |

TABLE 30

| Sequence region | SEQ ID |
|---|---|
| pegRNA Spacer | 5555 |
| PBS | 5556 |
| PBS | 5557 |
| PBS | 5558 |
| PBS | 5559 |
| PBS | 5560 |
| PBS | 5561 |
| PBS | 5562 |
| PBS | 5563 |
| PBS | 5564 |
| PBS | 5565 |
| PBS | 5566 |
| RTT | 5567 |
| RTT | 5568 |
| RTT | 5569 |
| RTT | 5570 |
| RTT | 5571 |
| RTT | 5572 |
| RTT | 5573 |
| RTT | 5574 |
| RTT | 5575 |
| RTT | 5576 |
| RTT | 5577 |
| RTT | 5578 |
| RTT | 5579 |
| RTT | 5580 |
| RTT | 5581 |
| RTT | 5582 |
| RTT | 5583 |
| RTT | 5584 |
| RTT | 5585 |
| RTT | 5586 |
| RTT | 5587 |
| RTT | 5588 |
| RTT | 5589 |
| RTT | 5590 |
| ngRNA Spacer | 65 |
| ngRNA Spacer | 64 |
| ngRNA Spacer | 63 |
| ngRNA Spacer | 61 |
| ngRNA Spacer | 62 |
| ngRNA Spacer | 69 |
| ngRNA Spacer | 66 |
| ngRNA Spacer | 60 |
| ngRNA Spacer | 41 |
| ngRNA Spacer | 71 |
| pegRNA | 5591 |
| pegRNA | 5592 |
| pegRNA | 5593 |
| pegRNA | 5594 |
| pegRNA | 5595 |
| pegRNA | 5596 |
| pegRNA | 5597 |
| pegRNA | 5598 |
| pegRNA | 5599 |
| pegRNA | 5600 |
| pegRNA | 5601 |
| pegRNA | 5602 |
| pegRNA | 5603 |
| pegRNA | 5604 |
| pegRNA | 5605 |
| pegRNA | 5606 |
| pegRNA | 5607 |
| pegRNA | 5608 |
| pegRNA | 5609 |
| pegRNA | 5610 |
| pegRNA | 5611 |
| pegRNA | 5612 |
| pegRNA | 5613 |
| pegRNA | 5614 |
| pegRNA | 5615 |
| pegRNA | 5616 |
| pegRNA | 5617 |
| pegRNA | 5618 |
| pegRNA | 5619 |
| pegRNA | 5620 |
| pegRNA | 5621 |
| pegRNA | 5622 |
| pegRNA | 5623 |
| pegRNA | 5624 |
| pegRNA | 5625 |
| pegRNA | 5626 |
| pegRNA | 5627 |
| pegRNA | 5628 |
| pegRNA | 5629 |
| pegRNA | 5630 |
| pegRNA | 5631 |
| pegRNA | 5632 |
| pegRNA | 5633 |
| pegRNA | 5634 |
| pegRNA | 5635 |
| pegRNA | 5636 |
| pegRNA | 5637 |

TABLE 31

| Sequence region | SEQ ID |
|---|---|
| pegRNA Spacer | 5638 |
| PBS | 5639 |
| PBS | 5640 |
| PBS | 5641 |
| PBS | 5642 |
| PBS | 5643 |
| PBS | 5644 |
| PBS | 5645 |
| PBS | 5646 |
| PBS | 5647 |
| PBS | 5648 |
| PBS | 5649 |
| RTT | 5650 |
| RTT | 5651 |
| RTT | 5652 |
| RTT | 5653 |
| RTT | 5654 |
| RTT | 5655 |
| RTT | 5656 |
| RTT | 5657 |
| RTT | 5658 |
| RTT | 5659 |
| RTT | 5660 |
| RTT | 5661 |
| RTT | 5662 |
| RTT | 5663 |
| RTT | 5664 |
| RTT | 5665 |
| RTT | 5666 |
| RTT | 5667 |
| RTT | 5668 |
| ngRNA Spacer | 65 |
| ngRNA Spacer | 64 |
| ngRNA Spacer | 62 |
| ngRNA Spacer | 61 |
| ngRNA Spacer | 63 |
| ngRNA Spacer | 69 |
| ngRNA Spacer | 66 |
| ngRNA Spacer | 60 |
| ngRNA Spacer | 41 |
| ngRNA Spacer | 71 |
| pegRNA | 5669 |
| pegRNA | 5670 |
| pegRNA | 5671 |
| pegRNA | 5672 |
| pegRNA | 5673 |
| pegRNA | 5674 |
| pegRNA | 5675 |
| pegRNA | 5676 |
| pegRNA | 5677 |
| pegRNA | 5678 |
| pegRNA | 5679 |
| pegRNA | 5680 |
| pegRNA | 5681 |
| pegRNA | 5682 |
| pegRNA | 5683 |
| pegRNA | 5684 |
| pegRNA | 5685 |
| pegRNA | 5686 |
| pegRNA | 5687 |
| pegRNA | 5688 |
| pegRNA | 5689 |
| pegRNA | 5690 |
| pegRNA | 5691 |
| pegRNA | 5692 |
| pegRNA | 5693 |
| pegRNA | 5694 |
| pegRNA | 5695 |
| pegRNA | 5696 |
| pegRNA | 5697 |
| pegRNA | 5698 |
| pegRNA | 5699 |
| pegRNA | 5700 |
| pegRNA | 5701 |
| pegRNA | 5702 |
| pegRNA | 5703 |
| pegRNA | 5704 |
| pegRNA | 5705 |

TABLE 32

| Sequence region | SEQ ID |
|---|---|
| pegRNA Spacer | 5706 |
| PBS | 5707 |
| PBS | 5708 |
| PBS | 5709 |
| PBS | 5710 |
| PBS | 5711 |
| PBS | 5712 |
| PBS | 5713 |
| PBS | 5714 |
| PBS | 5715 |
| PBS | 5716 |
| PBS | 5717 |
| RTT | 5718 |
| RTT | 5719 |
| RTT | 5720 |
| RTT | 5721 |
| RTT | 5722 |
| RTT | 5723 |
| RTT | 5724 |
| RTT | 5725 |
| RTT | 5726 |
| RTT | 5727 |
| RTT | 5728 |
| RTT | 5729 |
| RTT | 5730 |
| RTT | 5731 |
| RTT | 5732 |
| RTT | 5733 |
| RTT | 5734 |
| RTT | 5735 |
| RTT | 5736 |
| RTT | 5737 |
| RTT | 5738 |
| ngRNA Spacer | 65 |
| ngRNA Spacer | 64 |
| ngRNA Spacer | 62 |
| ngRNA Spacer | 61 |
| ngRNA Spacer | 63 |
| ngRNA Spacer | 69 |
| ngRNA Spacer | 66 |
| ngRNA Spacer | 60 |
| ngRNA Spacer | 41 |
| ngRNA Spacer | 71 |
| pegRNA | 5739 |
| pegRNA | 5740 |
| pegRNA | 5741 |
| pegRNA | 5742 |
| pegRNA | 5743 |
| pegRNA | 5744 |
| pegRNA | 5745 |
| pegRNA | 5746 |
| pegRNA | 5747 |
| pegRNA | 5748 |
| pegRNA | 5749 |
| pegRNA | 5750 |
| pegRNA | 5751 |
| pegRNA | 5752 |
| pegRNA | 5753 |
| pegRNA | 5754 |
| pegRNA | 5755 |
| pegRNA | 5756 |
| pegRNA | 5757 |
| pegRNA | 5758 |
| pegRNA | 5759 |
| pegRNA | 5760 |
| pegRNA | 5761 |
| pegRNA | 5762 |
| pegRNA | 5763 |
| pegRNA | 5764 |
| pegRNA | 5765 |
| pegRNA | 5766 |
| pegRNA | 5767 |
| pegRNA | 5768 |
| pegRNA | 5769 |
| pegRNA | 5770 |
| pegRNA | 5771 |
| pegRNA | 5772 |
| pegRNA | 5773 |
| pegRNA | 5774 |
| pegRNA | 5775 |
| pegRNA | 5776 |
| pegRNA | 5777 |
| pegRNA | 5778 |
| pegRNA | 5779 |

[0260] In some embodiments, a PEgRNA as described herein comprises a spacer comprising a PEgRNA spacer sequence as provided in Table x, a PBS comprising a PBS sequence as provided in Table x, and an editing template comprising an RTT sequence as provided in Table x, wherein for each PEgRNA, x is the same integer for the spacer, the PBS, and the editing template, and wherein x is an integer selected from 6, 7, 8, 9, 10, 11, 12, 15, 16, 17, 18, 19, 20, 21, 22, 23, 24, 25, 26, 27, 28, 29, 30, 31, and 32. In some embodiments, the PEgRNA is a part of a prime editing system, wherein the PEgRNA comprises a spacer comprising a PEgRNA spacer sequence as provided in Table x, a PBS comprising a PBS sequence as provided in Table x, and an editing template comprising an RTT sequence as provided in Table x, and wherein the prime editing system further comprises an ngRNA, wherein the ngRNA comprises a ngRNA spacer sequence as provided in Table x, wherein x is the same integer for the spacer, PBS, and editing template selection and for the ngRNA spacer selection, and wherein x is an integer selected from 6, 7, 8, 9, 10, 11, 12, 15, 16, 17, 18, 19, 20, 21, 22, 23, 24, 25, 26, 27, 28, 29, 30, 31 and 32.

[0261] In some embodiments, the PEgRNA and/or the ngRNA comprises a gRNA core, wherein the gRNA core comprises a sequence selected from SEQ ID Nos 5857-5859.

[0262] Table 6 provides Prime Editing guide RNAs (PEgRNAs), which can be used in Prime Editing systems disclosed herein. Such Prime Editing systems can comprise a Cas9 protein capable of recognizing an NGG or an NG PAM sequence (e.g., TGG or TG), and a reverse transcriptase. The Prime Editing systems (e.g., PE3 or PE3b systems) can further comprise a nick guide RNA (ngRNA). Such PEgRNAs and Prime Editing systems can be used, for example, to correct an H1069Q mutation in ATP7B.

[0263] The PEgRNAs of Table 6 comprise: (a) a spacer comprising nucleotides 5-20 of SEQ ID NO: 1, (b) a gRNA core capable of binding to a Cas9 protein, and (c) an extension arm comprising: (i) an editing template comprising any one of SEQ ID NOs: 13-17, and (ii) a primer binding site (PBS) comprising any one of SEQ ID NOs: 2-12. The spacer of the PEgRNA can comprise, for example, nucleotides 4-20, 3-20, 2-20, or 1-20 of SEQ ID NO: 1. The spacer of the PEgRNA can comprise SEQ ID NO: 1. The RTT and the PBS can comprise respectively SEQ ID NOs: 13 and 2, 13 and 3, 13 and 4, 13 and 5, 13 and 6, 13 and 7, 13 and 8, 13 and 9, 13 and 10, 13 and 11, 13 and 12, 14 and 2, 14 and 3, 14 and 4, 14 and 5, 14 and 6, 14 and 7, 14 and 8, 14 and 9, 14 and 10, 14 and 11, 14 and 12, 15 and 2, 15 and 3, 15 and 4, 15 and 5, 15 and 6, 15 and 7, 15 and 8, 15 and 9, 15 and 10, 15 and 11, 15 and 12, 16 and 2, 16 and 3, 16 and 4, 16 and 5, 16 and 6, 16 and 7, 16 and 8, 16 and 9, 16 and 10, 16 and 11, 16 and 12, 17 and 2, 17 and 3, 17 and 4, 17 and 5, 17 and 6, 17 and 7, 17 and 8, 17 and 9, 17 and 10, 17 and 11, or 17 and 12. The gRNA core of the PEgRNA can comprise SEQ ID NO: 5857-5859. Exemplary PEgRNAs provided in Table 6 can comprise SEQ ID NOs: 73, 74, 75, 76, 77, 78, 79, 80, 81, 82, 83, 84, 85, 86, 87, 88, 89, 90, 91, 92, 93, 94, 95, 96, 97, 98, 99, 100, 101, 102, 103, 104, 106, 107, 108, 109, 111, 116, 117, or 120. Any PEgRNA sequence disclosed in Table 6 may further comprise a 3′ motif at the 3′ end of the extension arm, for example, a hairpin-forming motif or a series of 3, 4 or more U nucleotides. Without being bound by theory, such 3′ motifs are believed to increase PEgRNA stability. Such PEgRNA sequences may alternatively or additionally be adapted for transcription from a DNA template, for example, by including a 5′ terminal G if the spacer of the PEgRNA begins with another nucleotide, by including 6 or 7 U nucleotides at the 3′ end of the extension arm, or both. Exemplary transcription-adapted sequences include SEQ ID NOs: 105, 110, 112, 113, 114, 115, 118, 119, 121, 122, 123, 124, 125, 126, 127, 128, 129, 130, 131, 132, 133, 134, 135, 136, 137, 138, 139, 140, 141, 142, 143, 144, 145, 146, 147, 148, 149, 150, 151, and 152. Such plasmid adapted sequences may further comprise a hairpin-forming motif between the PBS and the 3′ terminal U series.

[0264] Any of the PEgRNAs of Table 6 can be used in a Prime Editing system further comprising a nick guide RNA (ngRNA). Such ngRNA can comprise a spacer comprising nucleotides 5-20 of any one of SEQ ID NOs: 18-72 and a gRNA core capable of binding to a Cas9 protein. The spacer of the ngRNA can comprise nucleotides 4-20, 3-20, 2-20, or 1-20 of any one of SEQ ID NO: 18-72. The spacer of the ngRNA can comprise any one of SEQ ID NO: 18-72. The gRNA core of the ngRNA can comprise SEQ ID NO: 5857-5859. Exemplary ngRNA provided in Table 6 can comprise any one of SEQ ID NOs: 153-181. Such ngRNA sequences may further comprise a 3′ motif at the 3′ end of the gRNA core, for example, a series of 3, 4 or more U nucleotides. Without being bound by theory, such 3′ motifs are believed to increase ngRNA stability.

[0265] Table 7 provides Prime Editing guide RNAs (PEgRNAs), which can be used in Prime Editing systems disclosed herein. Such Prime Editing systems can comprise a Cas9 protein capable of recognizing an NGG, NG, or NNGG PAM sequence (e.g., TGG, TG, or TGGG), and a reverse transcriptase. The Prime Editing systems (e.g., PE3 or PE3b systems) can further comprise a nick guide RNA (ngRNA). Such PEgRNAs and Prime Editing systems can be used, for example, to correct an H1069Q mutation in ATP7B.

[0266] The PEgRNAs of Table 7 comprise: (a) a spacer comprising nucleotides 5-20 of SEQ ID NO: 182, (b) a gRNA core capable of binding to a Cas9 protein, and (c) an extension arm comprising: (i) an editing template comprising any one of SEQ ID NOs: 194-198, and (ii) a primer binding site (PBS) comprising any one of SEQ ID NOs: 183-193. The spacer of the PEgRNA can comprise, for example, nucleotides 4-20, 3-20, 2-20, or 1-20 of SEQ ID NO: 182. The spacer of the PEgRNA can comprise SEQ ID NO: 182. The RTT and the PBS can comprise respectively SEQ ID NOs: 194 and 183, 194 and 184, 194 and 185, 194 and 186, 194 and 187, 194 and 188, 194 and 189, 194 and 190, 194 and 191, 194 and 192, 194 and 193, 195 and 183, 195 and 184, 195 and 185, 195 and 186, 195 and 187, 195 and 188, 195 and 189, 195 and 190, 195 and 191, 195 and 192, 195 and 193, 196 and 183, 196 and 184, 196 and 185, 196 and 186, 196 and 187, 196 and 188, 196 and 189, 196 and 190, 196 and 191, 196 and 192, 196 and 193, 197 and 183, 197 and 184, 197 and 185, 197 and 186, 197 and 187, 197 and 188, 197 and 189, 197 and 190, 197 and 191, 197 and 192, 197 and 193, 198 and 183, 198 and 184, 198 and 185, 198 and 186, 198 and 187, 198 and 188, 198 and 189, 198 and 190, 198 and 191, 198 and 192, or 198 and 193. The gRNA core of the PEgRNA can comprise SEQ ID NO: 5857-5859. Exemplary PEgRNAs provided in Table 7 can comprise SEQ ID NOs. 210, 211, 212, 213, 214, 215, 216, 217, 218, 219, 220, 221, 222, 223, 224, 225, 226,227, 228, 229, 230, 231, 232, 233, 234, 235, 236, 237, 238, 239, 240, 241, 242, 243, 245, 247, 248, 250, 251, or 255. Such PEgRNA sequences may further comprise a 3′ motif at the 3′ end of the extension arm, for example, a hairpin-forming motif or a series of 3, 4 or more U nucleotides. Without being bound by theory, such 3′ motifs are believed to increase PEgRNA stability. Such PEgRNA sequences may alternatively or additionally be adapted for transcription from a DNA template, for example, by including a 5′ terminal G if the spacer of the PEgRNA begins with another nucleotide, by including 6 or 7 U nucleotides at the 3′ end of the extension arm, or both. Exemplary transcription-adapted sequences include SEQ ID NOs: 244, 246, 249, 252, 253, 254, 256, 257, 258, 259, 260, 261, 262, 263, 264, 265, 266, 267, 268, 269, 270, 271, 272, 273, 274, 275, 276, 277, 278, 279, 280, 281, 282, 283, 284, 285, 286, 287, 288, and 289. Such plasmid adapted sequences may further comprise a hairpin-forming motif between the PBS and the 3′ terminal U series.

[0267] Any of the PEgRNAs of Table 7 can be used in a Prime Editing system further comprising a nick guide RNA (ngRNA). Such ngRNA can comprise a spacer comprising nucleotides 5-20 of SEQ ID NO: 18, 19, 20, 21, 22, 23, 24, 25, 26, 27, 28, 29, 30, 31, 32, 33, 34, 35, 36, 37, 38, 39, 40, 41, 42, 43, 44, 45, 46, 47, 48, 49, 50, 51, 52, 53, 54, 55, 56, 57, 58, 59, 60, 61, 62, 63, 64, 65, 66, 67, 68, 69, 70, 71, 72, 199, 200, 201, 202, 203, 204, 205, 206, 207, 208, or 209 and a gRNA core capable of binding to a Cas9 protein. The spacer of the ngRNA can comprise nucleotides 4-20, 3-20, 2-20, or 1-20 of SEQ ID NO: 18, 19, 20, 21, 22, 23, 24, 25, 26, 27, 28, 29, 30, 31, 32, 33, 34, 35, 36, 37, 38, 39, 40, 41, 42, 43, 44, 45, 46, 47, 48, 49, 50, 51, 52, 53, 54, 55, 56, 57, 58, 59, 60, 61, 62, 63, 64, 65, 66, 67, 68, 69, 70, 71, 72, 199, 200, 201, 202, 203, 204, 205, 206, 207, 208, or 209. The spacer of the ngRNA can comprise SEQ ID NO: 18, 19, 20, 21, 22, 23, 24, 25, 26, 27, 28, 29, 30, 31, 32, 33, 34, 35, 36, 37, 38, 39, 40, 41, 42, 43, 44, 45, 46, 47, 48, 49, 50, 51, 52, 53, 54, 55, 56, 57, 58, 59, 60, 61, 62, 63, 64, 65, 66, 67, 68, 69, 70, 71, 72, 199, 200, 201, 202, 203, 204, 205, 206, 207, 208, or 209. The gRNA core of the ngRNA can comprise SEQ ID NO: 5857-5859. Exemplary ngRNA provided in Table 7 can comprise SEQ ID NOs: 153, 154, 155, 156, 157, 158, 159, 160, 161, 162, 163, 164, 165, 166, 167, 168, 169, 170, 171, 172, 173, 174, 175, 176, 177, 178, 179, 180, 181, 290, 291, 292, or 293. Such ngRNA sequences may further comprise a 3′ motif at the 3′ end of the gRNA core, for example, a series of 3, 4 or more U nucleotides. Without being bound by theory, such 3′ motifs are believed to increase ngRNA stability.

[0268] Table 8 provides Prime Editing guide RNAs (PEgRNAs), which can be used in Prime Editing systems disclosed herein. Such Prime Editing systems can comprise a Cas9 protein capable of recognizing an NGG, NG, or NNGG PAM sequence (e.g., GGG, GG, GGGG), and a reverse transcriptase. The Prime Editing systems (e.g., PE3 or PE3b systems) can further comprise a nick guide RNA (ngRNA). Such PEgRNAs and Prime Editing systems can be used, for example, to correct an H1069Q mutation in ATP7B.

[0269] The PEgRNAs of Table 8 comprise: (a) a spacer comprising nucleotides 5-20 of SEQ ID NO: 294, (b) a gRNA core capable of binding to a Cas9 protein, and (c) an extension arm comprising: (i) an editing template comprising any one of SEQ ID NOs: 306-336, and (ii) a primer binding site (PBS) comprising any one of SEQ ID NOs: 295-305. The spacer of the PEgRNA can comprise, for example, nucleotides 4-20, 3-20, 2-20, or 1-20 of SEQ ID NO: 294. The spacer of the PEgRNA can comprise SEQ ID NO: 294. The RTT and the PBS can comprise respectively SEQ ID NOs: 306 and 295, 306 and 296, 306 and 297, 306 and 298, 306 and 299, 306 and 300, 306 and 301, 306 and 302, 306 and 303, 306 and 304, 306 and 305, 307 and 295, 307 and 296, 307 and 297, 307 and 298, 307 and 299, 307 and 300, 307 and 301, 307 and 302, 307 and 303, 307 and 304, 307 and 305, 308 and 295, 308 and 296, 308 and 297, 308 and 298, 308 and 299, 308 and 300, 308 and 301, 308 and 302, 308 and 303, 308 and 304, 308 and 305, 309 and 295, 309 and 296, 309 and 297, 309 and 298, 309 and 299, 309 and 300, 309 and 301, 309 and 302, 309 and 303, 309 and 304, 309 and 305, 310 and 295, 310 and 296, 310 and 297, 310 and 298, 310 and 299, 310 and 300, 310 and 301, 310 and 302, 310 and 303, 310 and 304, 310 and 305, 311 and 295, 311 and 296, 311 and 297.311 and 298, 311 and 299, 311 and 300, 311 and 301, 311 and 302, 311 and 303, 311 and 304, 311 and 305, 312 and 295, 312 and 296, 312 and 297, 312 and 298, 312 and 299, 312 and 300, 312 and 301, 312 and 302, 312 and 303, 312 and 304, 312 and 305, 313 and 295, 313 and 296, 313 and 297.313 and 298, 313 and 299, 313 and 300, 313 and 301, 313 and 302, 313 and 303, 313 and 304, 313 and 305, 314 and 295, 314 and 296, 314 and 297, 314 and 298, 314 and 299, 314 and 300, 314 and 301, 314 and 302, 314 and 303, 314 and 304, 314 and 305, 315 and 295, 315 and 296, 315 and 297, 315 and 298, 315 and 299, 315 and 300, 315 and 301, 315 and 302, 315 and 303, 315 and 304, 315 and 305, 316 and 295, 316 and 296, 316 and 297, 316 and 298, 316 and 299, 316 and 304, 316 and 301, 316 and 302, 316 and 303, 316 and 304, 316 and 305, 317 and 295, 317 and 296, 317 and 297, 317 and 298, 317 and 299, 317 and 300, 317 and 301, 317 and 302, 317 and 303, 317 and 304, 317 and 305, 318 and 295, 318 and 296, 318 and 297, 318 and 298, 318 and 299, 318 and 300, 318 and 301, 318 and 302, 318 and 303, 318 and 304, 318 and 305, 319 and 295, 319 and 296, 319 and 297, 319 and 298, 319 and 299, 319 and 300, 319 and 301, 319 and 302, 319 and 303, 319 and 304, 319 and 305, 320 and 295, 320 and 296, 320 and 297, 320 and 298, 320 and 299, 320 and 300, 320 and 301, 320 and 302, 320 and 303, 320 and 304, 320 and 305, 321 and 295, 321 and 296, 321 and 297, 321 and 298, 321 and 299, 321 and 300, 321 and 301, 321 and 302, 321 and 303, 321 and 304, 321 and 305, 322 and 295, 322 and 296, 322 and 297, 322 and 298, 322 and 299, 322 and 300, 322 and 301, 322 and 302, 322 and 303, 322 and 304, 322 and 305, 323 and 295, 323 and 296, 323 and 297, 323 and 298, 323 and 299, 323 and 300, 323 and 301, 323 and 302, 323 and 303, 323 and 304, 323 and 305, 324 and 295, 324 and 296, 324 and 297, 324 and 298, 324 and 299, 324 and 300, 324 and 301, 324 and 302, 324 and 303, 324 and 304, 324 and 305, 325 and 295, 325 and 296, 325 and 297, 325 and 298, 325 and 299, 325 and 300, 325 and 301, 325 and 302, 325 and 303, 325 and 304, 325 and 305, 326 and 295, 326 and 296, 326 and 297, 326 and 298, 326 and 299, 326 and 300, 326 and 301, 326 and 302, 326 and 303, 326 and 304, 326 and 305, 327 and 295, 327 and 296, 327 and 297, 327 and 298, 327 and 299, 327 and 300, 327 and 301, 327 and 302, 327 and 303, 327 and 304, 327 and 305, 328 and 295, 328 and 296, 328 and 297, 328 and 298, 328 and 299, 328 and 300, 328 and 301, 328 and 302, 328 and 303, 328 and 304, 328 and 305, 329 and 295, 329 and 296, 329 and 297, 329 and 298, 329 and 299, 329 and 300, 329 and 301, 329 and 302, 329 and 303, 329 and 304, 329 and 305, 330 and 295, 330 and 296, 330 and 297, 330 and 298, 330 and 299, 330 and 300, 330 and 301, 330 and 302, 330 and 303, 330 and 304, 330 and 305, 331 and 295, 331 and 296, 331 and 297, 331 and 298, 331 and 299, 331 and 300, 331 and 301, 331 and 302, 331 and 303, 331 and 304, 331 and 305, 332 and 295, 332 and 296, 332 and 297, 332 and 298, 332 and 299, 332 and 300, 332 and 301, 332 and 302, 332 and 303, 332 and 304, 332 and 305, 333 and 295, 333 and 296, 333 and 297, 333 and 298, 333 and 299, 333 and 300, 333 and 301, 333 and 302, 333 and 303, 333 and 304, 333 and 305, 334 and 295, 334 and 296, 334 and 297, 334 and 298, 334 and 299, 334 and 300, 334 and 301, 334 and 302, 334 and 303, 334 and 304, 334 and 305, 335 and 295, 335 and 296, 335 and 297, 335 and 298, 335 and 299, 335 and 300, 335 and 301, 335 and 302, 335 and 303, 335 and 304, 335 and 305, 336 and 295, 336 and 296, 336 and 297, 336 and 298, 336 and 299, 336 and 300, 336 and 301, 336 and 302, 336 and 303, 336 and 304, or 336 and 305. The gRNA core of the PEgRNA can comprise SEQ ID NOs. any one of 5857-5859. Exemplary PEgRNAs provided in Table 8 can comprise SEQ ID NOs. 338, 339, 340, 341, 342, 343, 344, 345, 346, 347, 348, 349, 350, 351, 352, 353, 354, 355, 356, 357, 358, 359, 360, 361, 362, 363, 364, 365, 366, 367, 368, 369, 370, 371, 372, 373, 374, 375, 376, 377, 378, 379, 380, 381, 382, 383, 384, 386, 389, 390, 391, 392, 394, 397, 398, 400, 401, 404, 406, 408, 415, 417, 425, 427, 429, 433, 442, 444, 448, 449, 453, 454, 457, 458, 460, 461, 462, 463, 464, 465, 466, 467, 468, 469, 470, 471, 472, 473, 474, 475, 476, 477, 478, 479, 480, 481, or 482. Such PEgRNA sequences may further comprise a 3′ motif at the 3′ end of the extension arm, for example, a hairpin-forming motif or a series of 3, 4 or more U nucleotides. Without being bound by theory, such 3′ motifs are believed to increase PEgRNA stability. Such PEgRNA sequences may alternatively or additionally be adapted for transcription from a DNA template, for example, by including a 5′ terminal G if the spacer of the PEgRNA begins with another nucleotide, by including 6 or 7 U nucleotides at the 3′ end of the extension arm, or both. Exemplary transcription-adapted sequences include SEQ ID NOs: 385, 387, 388, 393, 395, 396, 399, 402, 403, 405, 407, 409, 410, 411, 412, 413, 414, 416, 418, 419, 420, 421, 422, 423, 424, 426, 428, 430, 431, 432, 434, 435, 436, 437, 438, 439, 440, 441, 443, 445, 446, 447, 450, 451, 452, 455, 456, and 459. Such plasmid adapted sequences may further comprise a hairpin-forming motif between the PBS and the 3′ terminal U series.

[0270] Any of the PEgRNAs of Table 8 can be used in a Prime Editing system further comprising a nick guide RNA (ngRNA). Such ngRNA can comprise a spacer comprising nucleotides 5-20 of SEQ ID NO: 18, 19, 20, 21, 22, 23, 24, 25, 26, 27, 28, 29, 30, 31, 32, 33, 34, 35, 36, 37, 38, 39, 40, 41, 42, 43, 44, 45, 46, 47, 48, 49, 50, 51, 52, 53, 54, 55, 56, 57, 58, 59, 60, 61, 62, 63, 64, 65, 66, 67, 68, 69, 70, 71, 72, 199, 200, 201, 202, 203, 204, 205, 206, 207, 208, 209, or 337 and a gRNA core capable of binding to a Cas9 protein. The spacer of the ngRNA can comprise nucleotides 4-20, 3-20, 2-20, or 1-20 of SEQ ID NO: 18, 19, 20, 21, 22, 23, 24, 25, 26, 27, 28, 29, 30, 31, 32, 33, 34, 35, 36, 37, 38, 39, 40, 41, 42, 43, 44, 45, 46, 47, 48, 49, 50, 51, 52, 53, 54, 55, 56, 57, 58, 59, 60, 61, 62, 63, 64, 65, 66, 67, 68, 69, 70, 71, 72, 199, 200, 201, 202, 203, 204, 205, 206, 207, 208, 209, or 337. The spacer of the ngRNA can comprise SEQ ID NO: 18, 19, 20, 21, 22, 23, 24, 25, 26, 27, 28, 29, 30, 31, 32, 33, 34, 35, 36, 37, 38, 39, 40, 41, 42, 43, 44, 45, 46, 47, 48, 49, 50, 51, 52, 53, 54, 55, 56, 57, 58, 59, 60, 61, 62, 63, 64, 65, 66, 67, 68, 69, 70, 71, 72, 199, 200, 201, 202, 203, 204, 205, 206, 207, 208, 209, or 337. The gRNA core of the ngRNA can comprise SEQ ID NO. 5857-5859. Exemplary ngRNA provided in Table 8 can comprise SEQ ID NO: 153, 154, 155, 156, 157, 158, 159, 160, 161, 162, 163, 164, 165, 166, 167, 168, 169, 170, 171, 172, 173, 174, 175, 176, 177, 178, 179, 180, 181, 290, 291, 292, or 293. Such ngRNA sequences may further comprise a 3′ motif at the 3′ end of the gRNA core, for example, a series of 3, 4 or more U nucleotides. Without being bound by theory, such 3′ motifs are believed to increase ngRNA stability.

[0271] Table 9 provides Prime Editing guide RNAs (PEgRNAs), which can be used in Prime Editing systems disclosed herein. Such Prime Editing systems can comprise a Cas9 protein capable of recognizing an NGG or NG PAM sequence (e.g., GGG or GG), and a reverse transcriptase. The Prime Editing systems (e.g., PE3 or PE3b systems) can further comprise a nick guide RNA (ngRNA). Such PEgRNAs and Prime Editing systems can be used, for example, to correct an H1069Q mutation in ATP7B.

[0272] The PEgRNAs of Table 9 comprise: (a) a spacer comprising nucleotides 5-20 of SEQ ID NO: 483, (b) a gRNA core capable of binding to a Cas9 protein, and (c) an extension arm comprising: (i) an editing template comprising any one of SEQ ID NOs: 495-528, and (ii) a primer binding site (PBS) comprising any one of SEQ ID NOs: 484-494. The spacer of the PEgRNA can comprise, for example, nucleotides 4-20, 3-20, 2-20, or 1-20 of SEQ ID NO: 483. The spacer of the PEgRNA can comprise SEQ ID NO: 483. The RTT and the PBS can comprise respectively SEQ ID NOs: 495 and 484, 495 and 485, 495 and 486, 495 and 487, 495 and 488, 495 and 489, 495 and 490, 495 and 491, 495 and 492, 495 and 493, 495 and 494, 496 and 484, 496 and 485, 496 and 486, 496 and 487, 496 and 488, 496 and 489, 496 and 490, 496 and 491, 496 and 492, 496 and 493, 496 and 494, 497 and 484, 497 and 485, 497 and 486, 497 and 487, 497 and 488, 497 and 489, 497 and 490, 497 and 491, 497 and 492, 497 and 493, 497 and 494, 498 and 484, 498 and 485, 498 and 486, 498 and 487, 498 and 488, 498 and 489, 498 and 490, 498 and 491, 498 and 492, 498 and 493, 498 and 494, 499 and 484, 499 and 485, 499 and 486, 499 and 487, 499 and 488, 499 and 489, 499 and 490, 499 and 491, 499 and 492, 499 and 493, 499 and 494, 500 and 484, 500 and 485, 500 and 486, 500 and 487, 500 and 488, 500 and 489, 500 and 490, 500 and 491, 500 and 492, 500 and 493, 500 and 494, 501 and 484, 501 and 485, 501 and 486, 501 and 487, 501 and 488, 501 and 489, 501 and 490, 501 and 491, 501 and 492, 501 and 493, 501 and 494, 502 and 484, 502 and 485, 502 and 486, 502 and 487, 502 and 488, 502 and 489, 502 and 490, 502 and 491, 502 and 492, 502 and 493, 502 and 494, 503 and 484, 503 and 485, 503 and 486, 503 and 487, 503 and 488, 503 and 489, 503 and 490, 503 and 491, 503 and 492, 503 and 493, 503 and 494, 504 and 484, 504 and 485, 504 and 486, 504 and 487, 504 and 488, 504 and 489, 504 and 490, 504 and 491, 504 and 492, 504 and 493, 504 and 494, 505 and 484, 505 and 485, 505 and 486, 505 and 487, 505 and 488, 505 and 489, 505 and 490, 505 and 491, 505 and 492, 505 and 493, 505 and 494, 506 and 484, 506 and 485, 506 and 486, 506 and 487, 506 and 488, 506 and 489, 506 and 490, 506 and 491, 506 and 492, 506 and 493, 506 and 494, 507 and 484, 507 and 485, 507 and 486, 507 and 487, 507 and 488, 507 and 489, 507 and 490, 507 and 491, 507 and 492, 507 and 493, 507 and 494, 508 and 484, 508 and 485, 508 and 486, 508 and 487, 508 and 488, 508 and 489, 508 and 490, 508 and 491, 508 and 492, 508 and 493, 508 and 494, 509 and 484, 509 and 485, 509 and 486, 509 and 487, 509 and 488, 509 and 489, 509 and 490, 509 and 491, 509 and 492, 509 and 493, 509 and 494, 510 and 484, 510 and 485, 510 and 486, 510 and 487, 510 and 488, 510 and 489, 510 and 490, 510 and 491, 510 and 492, 510 and 493, 510 and 494, 511 and 484, 511 and 485, 511 and 486, 511 and 487, 511 and 488, 511 and 489, 511 and 490, 511 and 491, 511 and 492, 511 and 493, 511 and 494, 512 and 484, 512 and 485, 512 and 486, 512 and 487, 512 and 488, 512 and 489, 512 and 490, 512 and 491, 512 and 492, 512 and 493, 512 and 494, 513 and 484, 513 and 485, 513 and 486, 513 and 487, 513 and 488, 513 and 489, 513 and 490, 513 and 491, 513 and 492, 513 and 493, 513 and 494, 514 and 484, 514 and 485, 514 and 486, 514 and 487, 514 and 488, 514 and 489, 514 and 490, 514 and 491, 514 and 492, 514 and 493, 514 and 494, 515 and 484, 515 and 485, 515 and 486, 515 and 487, 515 and 488, 515 and 489, 515 and 490, 515 and 491, 515 and 492, 515 and 493, 515 and 494, 516 and 484, 516 and 485, 516 and 486, 516 and 487, 516 and 488, 516 and 489, 516 and 490, 516 and 491, 516 and 492, 516 and 493, 516 and 494, 517 and 484, 517 and 485, 517 and 486, 517 and 487, 517 and 488, 517 and 489, 517 and 490, 517 and 491, 517 and 492, 517 and 493, 517 and 494, 518 and 484, 518 and 485, 518 and 486, 518 and 487, 518 and 488, 518 and 489, 518 and 490, 518 and 491, 518 and 492, 518 and 493, 518 and 494, 519 and 484, 519 and 485, 519 and 486, 519 and 487, 519 and 488, 519 and 489, 519 and 490, 519 and 491, 519 and 492, 519 and 493, 519 and 494, 520 and 484, 520 and 485, 520 and 486, 520 and 487, 520 and 488, 520 and 489, 520 and 490, 520 and 491, 520 and 492, 520 and 493, 520 and 494, 521 and 484, 521 and 485, 521 and 486, 521 and 487, 521 and 488, 521 and 489, 521 and 490, 521 and 491, 521 and 492, 521 and 493, 521 and 494, 522 and 484, 522 and 485, 522 and 486, 522 and 487, 522 and 488, 522 and 489, 522 and 490, 522 and 491, 522 and 492, 522 and 493, 522 and 494, 523 and 484, 523 and 485, 523 and 486, 523 and 487, 523 and 488, 523 and 489, 523 and 490, 523 and 491, 523 and 492, 523 and 493, 523 and 494, 524 and 484, 524 and 485, 524 and 486, 524 and 487, 524 and 488, 524 and 489, 524 and 490, 524 and 491, 524 and 492, 524 and 493, 524 and 494, 525 and 484, 525 and 485, 525 and 486, 525 and 487, 525 and 488, 525 and 489, 525 and 490, 525 and 491, 525 and 492, 525 and 493, 525 and 494, 526 and 484, 526 and 485, 526 and 486, 526 and 487, 526 and 488, 526 and 489, 526 and 490, 526 and 491, 526 and 492, 526 and 493, 526 and 494, 527 and 484, 527 and 485, 527 and 486, 527 and 487, 527 and 488, 527 and 489, 527 and 490, 527 and 491, 527 and 492, 527 and 493, 527 and 494, 528 and 484, 528 and 485, 528 and 486, 528 and 487, 528 and 488, 528 and 489, 528 and 490, 528 and 491, 528 and 492, 528 and 493, or 528 and 494. The gRNA core of the PEgRNA can comprise SEQ ID NO. 5857-5859. Exemplary PEgRNAs provided in Table 9 can comprise SEQ ID NO. 530, 531, 532, 533, 534, 535, 536, 537, 538, 539, 540, 541, 542, 543, 544, 545, 546, 547, 548, 549, 550, 551, 552, 553, 554, 555, 556, 557, 558, 559, 560, 561, 562, 563, 564, 565, 566, 567, 568, 569, 570, 571, 572, 574, 575, 577, 578, 580, 581, 582, 583, 584, 585, 586, 588, 592, 593, 594, 597, 598, 600, 601, 608, 609, 612, 620, 621, 627, 628, 631, 639, 640, 644, 647, 649, 650, 654, 655, 656, 657, 658, 659, 660, 661, 662, 663, 664, 665, 666, 667, 668, 669, 670, 671, 672, 673, 674, 675, 676, 677, 678, 679, or 680. Such PEgRNA sequences may further comprise a 3′ motif at the 3′ end of the extension arm, for example, a hairpin-forming motif or a series of 3, 4 or more U nucleotides. Without being bound by theory, such 3′ motifs are believed to increase PEgRNA stability. Such PEgRNA sequences may alternatively or additionally be adapted for transcription from a DNA template, for example, by including a 5′ terminal G if the spacer of the PEgRNA begins with another nucleotide, by including 6 or 7 U nucleotides at the 3′ end of the extension arm, or both. Exemplary transcription-adapted sequences include SEQ ID NOs: 573, 576, 579, 587, 589, 590, 591, 595, 596, 599, 602, 603, 604, 605, 606, 607, 610, 611, 613, 614, 615, 616, 617,618, 619, 622, 623, 624, 625, 626, 629, 630, 632, 633, 634, 635, 636, 637, 638, 641, 642, 643, 645, 646, 648, 651, 652, and 653. Such plasm id adapted sequences may further comprise a hairpin-forming motif between the PBS and the 3′ terminal U series.

[0273] Any of the PEgRNAs of Table 9 can be used in a Prime Editing system further comprising a nick guide RNA (ngRNA). Such ngRNA can comprise a spacer comprising nucleotides 5-20 of SEQ ID NO: 18, 19, 20, 21, 22, 23, 24, 25, 26, 27, 28, 29, 30, 31, 32, 33, 34, 35, 36, 37, 38, 39, 40, 41, 42, 43, 44, 45, 46, 47, 48, 49, 50, 51, 52, 53, 54, 55, 56, 57, 58, 59, 60, 61, 62, 63, 64, 65, 66, 67, 68, 69, 70, 71, 72, 199, 200, 203, or 529 and a gRNA core capable of binding to a Cas9 protein. The spacer of the ngRNA can comprise nucleotides 4-20, 3-20, 2-20, or 1-20 of SEQ ID NO: 18, 19, 20, 21, 22, 23, 24, 25, 26, 27, 28, 29, 30, 31, 32, 33, 34, 35, 36, 37, 38, 39, 40, 41, 42, 43, 44, 45, 46, 47, 48, 49, 50, 51, 52, 53, 54, 55, 56, 57, 58, 59, 60, 61, 62, 63, 64, 65, 66, 67, 68, 69, 70, 71, 72, 199, 200, 203, or 529. The spacer of the ngRNA can comprise SEQ ID NO: 18, 19, 20, 21, 22, 23, 24, 25, 26, 27, 28, 29, 30, 31, 32, 33, 34, 35, 36, 37, 38, 39, 40, 41, 42, 43, 44, 45, 46, 47, 48, 49, 50, 51, 52, 53, 54, 55, 56, 57, 58, 59, 60, 61, 62, 63, 64, 65, 66, 67, 68, 69, 70, 71, 72, 199, 200, 203, or 529. The gRNA core of the ngRNA can comprise SEQ ID NO. 5857-5859. Exemplary ngRNA provided in Table 9 can comprise SEQ ID NO: 153, 154, 155, 156, 157, 158, 159, 160, 161, 162, 163, 164, 165, 166, 167, 168, 169, 170, 171, 172, 173, 174, 175, 176, 177, 178, 179, 180, 181, 290, 291, 292, 293, or 681. Such ngRNA sequences may further comprise a 3′ motif at the 3′ end of the gRNA core, for example, a series of 3, 4 or more U nucleotides. Without being bound by theory, such 3′ motifs are believed to increase ngRNA stability.

[0274] Table 10 provides Prime Editing guide RNAs (PEgRNAs), which can be used in Prime Editing systems disclosed herein. Such Prime Editing systems can comprise a Cas9 protein capable of recognizing an NOG or NO PAM sequence (e.g., CGG or CG), and a reverse transcriptase. The Prime Editing systems (e.g., PE3 or PE3b systems) can further comprise a nick guide RNA (ngRNA). Such PEgRNAs and Prime Editing systems can be used, for example, to correct an 11069Q mutation in ATP7B.

[0275] The PEgRNAs of Table 10 comprise: (a) a spacer comprising nucleotides 5-20 of SEQ ID NO: 682, (b) a gRNA core capable of binding to a Cas9 protein, and (c) an extension arm comprising: (i) an editing template comprising any one of SEQ ID NOs: 694-735, and (ii) a primer binding site (PBS) comprising any one of SEQ ID NOs: 683-693. The spacer of the PEgRNA can comprise, for example, nucleotides 4-20, 3-20, 2-20, or 1-20 of SEQ ID NO: 682. The spacer of the PEgRNA can comprise SEQ ID NO: 682. The RTT and the PBS can comprise respectively SEQ ID NOs: 694 and 683, 694 and 684, 694 and 685, 694 and 686, 694 and 687, 694 and 688, 694 and 689, 694 and 690, 694 and 691, 694 and 692, 694 and 693, 695 and 683, 695 and 684, 695 and 685, 695 and 686, 695 and 687, 695 and 688, 695 and 689, 695 and 690, 695 and 691, 695 and 692, 695 and 693, 696 and 683, 696 and 684, 696 and 685, 696 and 686, 696 and 687, 696 and 688, 696 and 689, 696 and 690, 696 and 691, 696 and 692, 696 and 693, 697 and 683, 697 and 684, 697 and 685, 697 and 686, 697 and 687, 697 and 688, 697 and 689, 697 and 690, 697 and 691, 697 and 692, 697 and 693, 698 and 683, 698 and 684, 698 and 685, 698 and 686, 698 and 687, 698 and 688, 698 and 689, 698 and 690, 698 and 691, 698 and 692, 698 and 693, 699 and 683, 699 and 684, 699 and 685, 699 and 686, 699 and 687, 699 and 688, 699 and 689, 699 and 690, 699 and 691, 699 and 692, 699 and 693, 700 and 683, 700 and 684, 700 and 685, 700 and 686, 700 and 687, 700 and 688, 700 and 689, 700 and 690, 700 and 691, 700 and 692, 700 and 693, 701 and 683, 701 and 684, 701 and 685, 701 and 686, 701 and 687, 701 and 688, 701 and 689, 701 and 690, 701 and 691, 701 and 692, 701 and 693, 702 and 683, 702 and 684, 702 and 685, 702 and 686, 702 and 687, 702 and 688, 702 and 689, 702 and 690, 702 and 691, 702 and 692, 702 and 693, 703 and 683, 703 and 684, 703 and 685, 703 and 686, 703 and 687, 703 and 688, 703 and 689, 703 and 690, 703 and 691, 703 and 692, 703 and 693, 704 and 683, 704 and 684, 704 and 685, 704 and 686, 704 and 687, 704 and 688, 704 and 689, 704 and 690, 704 and 691, 704 and 692, 704 and 693, 705 and 683, 705 and 684, 705 and 685, 705 and 686, 705 and 687, 705 and 688, 705 and 689, 705 and 690, 705 and 691, 705 and 692, 705 and 693, 706 and 683, 706 and 684, 706 and 685, 706 and 686, 706 and 687, 706 and 688, 706 and 689, 706 and 690, 706 and 691, 706 and 692, 706 and 693, 707 and 683, 707 and 684, 707 and 685, 707 and 686, 707 and 687, 707 and 688, 707 and 689, 707 and 690, 707 and 691, 707 and 692, 707 and 693, 708 and 683, 708 and 684, 708 and 685, 708 and 686, 708 and 687, 708 and 688, 708 and 689, 708 and 690, 708 and 691, 708 and 692, 708 and 693, 709 and 683, 709 and 684, 709 and 685, 709 and 686, 709 and 687, 709 and 688, 709 and 689, 709 and 690, 709 and 691, 709 and 692, 709 and 693, 710 and 683, 710 and 684, 710 and 685, 710 and 686, 710 and 687, 710 and 688, 710 and 689, 710 and 690, 710 and 691, 710 and 692, 710 and 693, 711 and 683, 711 and 684, 711 and 685, 711 and 686, 711 and 687, 711 and 688, 711 and 689, 711 and 690, 711 and 691, 711 and 692, 711 and 693, 712 and 683, 712 and 684, 712 and 685, 712 and 686, 712 and 687, 712 and 688, 712 and 689, 712 and 690, 712 and 691, 712 and 692, 712 and 693, 713 and 683, 713 and 684, 713 and 685, 713 and 686, 713 and 687, 713 and 688, 713 and 689, 713 and 690, 713 and 691, 713 and 692, 713 and 693, 714 and 683, 714 and 684, 714 and 685, 714 and 686, 714 and 687, 714 and 688, 714 and 689, 714 and 690, 714 and 691, 714 and 692, 714 and 693, 715 and 683, 715 and 684, 715 and 685, 715 and 686, 715 and 687, 715 and 688, 715 and 689, 715 and 690, 715 and 691, 715 and 692, 715 and 693, 716 and 683, 716 and 684, 716 and 685, 716 and 686, 716 and 687, 716 and 688, 716 and 689, 716 and 690, 716 and 691, 716 and 692, 716 and 693, 717 and 683, 717 and 684, 717 and 685, 717 and 686, 717 and 687, 717 and 688, 717 and 689, 717 and 690, 717 and 691, 717 and 692, 717 and 693, 718 and 683, 718 and 684, 718 and 685, 718 and 686, 718 and 687, 718 and 688, 718 and 689, 718 and 690, 718 and 691, 718 and 692, 718 and 693, 719 and 683, 719 and 684, 719 and 685, 719 and 686, 719 and 687, 719 and 688, 719 and 689, 719 and 690, 719 and 691, 719 and 692, 719 and 693, 720 and 683, 720 and 684, 720 and 685, 720 and 686, 720 and 687, 720 and 688, 720 and 689, 720 and 690, 720 and 691, 720 and 692, 720 and 693, 721 and 683, 721 and 684, 721 and 685, 721 and 686, 721 and 687, 721 and 688, 721 and 689, 721 and 690, 721 and 691, 721 and 692, 721 and 693, 722 and 683, 722 and 684, 722 and 685, 722 and 686, 722 and 687, 722 and 688, 722 and 689, 722 and 690, 722 and 691, 722 and 692, 722 and 693, 723 and 683, 723 and 684, 723 and 685, 723 and 686, 723 and 687, 723 and 688, 723 and 689, 723 and 690, 723 and 691, 723 and 692, 723 and 693, 724 and 683, 724 and 684, 724 and 685, 724 and 686, 724 and 687, 724 and 688, 724 and 689, 724 and 690, 724 and 691, 724 and 692, 724 and 693, 725 and 683, 725 and 684, 725 and 685, 725 and 686, 725 and 687, 725 and 688, 725 and 689, 725 and 690, 725 and 691, 725 and 692, 725 and 693, 726 and 683, 726 and 684, 726 and 685, 726 and 686, 726 and 687, 726 and 688, 726 and 689, 726 and 690, 726 and 691, 726 and 692, 726 and 693, 727 and 683, 727 and 684, 727 and 685, 727 and 686, 727 and 687, 727 and 688, 727 and 689, 727 and 690, 727 and 691, 727 and 692, 727 and 693, 728 and 683, 728 and 684, 728 and 685, 728 and 686, 728 and 687, 728 and 688, 728 and 689, 728 and 690, 728 and 691, 728 and 692, 728 and 693, 729 and 683, 729 and 684, 729 and 685, 729 and 686, 729 and 687, 729 and 688, 729 and 689, 729 and 690, 729 and 691, 729 and 692, 729 and 693, 730 and 683, 730 and 684, 730 and 685, 730 and 686, 730 and 687, 730 and 688, 730 and 689, 730 and 690, 730 and 691, 730 and 692, 730 and 693, 731 and 683, 731 and 684, 731 and 685, 731 and 686, 731 and 687, 731 and 688, 731 and 689, 731 and 690, 731 and 691, 731 and 692, 731 and 693, 732 and 683, 732 and 684, 732 and 685, 732 and 686, 732 and 687, 732 and 688, 732 and 689, 732 and 690, 732 and 691, 732 and 692, 732 and 693, 733 and 683, 733 and 684, 733 and 685, 733 and 686, 733 and 687, 733 and 688, 733 and 689, 733 and 690, 733 and 691, 733 and 692, 733 and 693, 734 and 683, 734 and 684, 734 and 685, 734 and 686, 734 and 687, 734 and 688, 734 and 689, 734 and 690, 734 and 691, 734 and 692, 734 and 693, 735 and 683, 735 and 684, 735 and 685, 735 and 686, 735 and 687, 735 and 688, 735 and 689, 735 and 690, 735 and 691, 735 and 692, or 735 and 693, The gRNA core of the PEgRNA can comprise SEQ ID NO. 5857-5859. Exemplary PEgRNAs provided in Table 10 can comprise SEQ ID NO. 741, 742, 743, 744, 745, 746, 747, 748, 749, 750, 751, 752, 753, 754, 755, 756, 757, 758, 759, 760, 761, 762, 763, 764, 765, 766, 767, 768, 769, 770, 771, 772, 773, 774, 775, 776, 777, 778, 779, 780, 781, 782, 783, 784, 785, 786, 787, 788, 789, 790, 791, 792, 793, 794, 795, 796, 797, 798, 799, 800, 801, 802, 803, 804, 805, 806, 807, 808, 809, 810, 811, 812, 813, 814, 815, 816, 817, 818, 819, 820, 821, 822, 823, 824, 825, 826, 827, 828, 829, 830, 831, 832, 833, 834, 835, 836, 837, 838, 839, 840, 841, 842, 843, 844, 845, 846, 847, 848, 849, 850, 851, 852, 853, 854, 855, 856, 857, 858, 859, 860, 861, 862, 863, 865, 866, 869, 870, 871, 872, 873, 874, 878, 879, 880, 881, 882, 883, 885, 887, 888, 890, 893, 894, 895, 896, 897, 898, 900, 902, 905, 906, 908, 909, 910, 911, 912, 914, 916, 918, 920, 922, 923, 924, 925, 926, 927, 928, 929, 930, 931, 932, 933, 934, 935, 936, 937, 938, 939, 959, 960, 961, 962, 963, 965, 966, 967, 970, 971, 977, 979, 983, 987, 989, 992, 997, 1000, 1018, 1019, 1020, 1021, 1022, 1023, 1024, 1025, 1037, 1041, 1043, 1044, 1045, 1046, 1050, 1057, 1068, 1074, 1076, 1077, 1078, 1079, 1080, 1081, 1082, 1084, 1085, 1087, 1101, 1103, 1104, 1105, 1106, 1107, 1108, 1109, 1110, 1111, 1112, 1113, 1114, 1115, 1116, 1124, 1139, 1140, 1141, 1144, 1147, 1151, 1155, 1159, 1160, 1163, 1166, 1167, 1168, 1169, 1171, 1172, 1185, 1187, 1190, 1191, 1197, 1199, 1203, 1208, 1209, 1210, 1218, 1219, 1220, 1221, 1222, 1223, 1229, 1230, 1233, 1235, 1236, 1237, 1240, 1244, 1248, 1261, 1263, 1264, 1265, 1266, 1267, 1268, 1269, 1270, 1272, 1273, 1278, 1282, 1285, 1289, 1292, 1294, 1297, 1299, 1305, 1309, 1310, 1311, 1313, 1314, 1315, 1316, 1317, 1318, 1319, 1329, 1333, 1334, 1338, 1340, 1342, 1344, 1345, 1346, 1347, 1348, 1353, 1355, 1357, 1362, 1363, 1364, 1368, 1369, 1370, 1376, 1383, 1388, 1395, 1396, 1413, 1414, 1415, or 1416. Such PEgRNA sequences may further comprise a 3′ motif at the 3′ end of the extension arm, for example, a hairpin-forming motif or a series of 3, 4 or more U nucleotides. Without being bound by theory, such 3′ motifs are believed to increase PEgRNA stability. Such PEgRNA sequences may alternatively or additionally be adapted for transcription from a DNA template, for example, by including a 5′ terminal G if the spacer of the PEgRNA begins with another nucleotide, by including 6 or 7 U nucleotides at the 3′ end of the extension arm, or both. Exemplary transcription-adapted sequences include SEQ ID NOs: 864, 867, 868, 875, 876, 877, 884, 886, 889, 891, 892, 899, 901, 903, 904, 907, 913, 915, 917, 919, 921, 940, 941, 942, 943, 944, 945, 946, 947, 948,949, 950, 951, 952, 953, 954, 955, 956, 957, 958, 964, 968, 969, 972, 973, 974, 975, 976, 978, 980, 981, 982, 984, 985, 986, 988, 990, 991, 993, 994, 995, 996, 998, 999, 1001, 1002, 1003, 1004, 1005, 1006, 1007, 1008, 1009, 1010, 1011, 1012, 1013, 1014, 1015, 1016, 1017, 1026, 1027, 1028, 1029, 1030, 1031, 1032, 1033, 1034, 1035, 1036, 1038, 1039, 1040, 1042, 1047, 1048, 1049, 1051, 1052, 1053, 1054, 1055, 1056, 1058, 1059, 1060, 1061, 1062, 1063, 1064, 1065, 1066, 1067, 1069, 1070, 1071, 1072, 1073, 1075, 1083, 1086, 1088, 1089, 1090, 1091, 1092, 1093, 1094, 1095, 1096, 1097, 1098, 1099, 1100, 1102, 1117, 1118, 1119, 1120, 1121, 1122, 1123, 1125, 1126, 1127, 1128, 1129, 1130, 1131, 1132, 1133, 1134, 1135, 1136, 1137, 1138, 1142, 1143, 1145, 1146, 1148, 1149, 1150, 1152, 1153, 1154, 1156, 1157, 1158, 1161, 1162, 1164, 1165, 1170, 1173, 1174, 1175, 1176, 1177, 1178, 1179, 1180, 1181, 1182, 1183, 1184, 1186, 1188, 1189, 1192, 1193, 1194, 1195, 1196, 1198, 1200, 1201, 1202, 1204, 1205, 1206, 1207, 1211, 1212, 1213, 1214, 1215, 1216, 1217, 1224, 1225, 1226, 1227, 1228, 1231, 1232, 1234, 1238, 1239, 1241, 1242, 1243, 1245, 1246, 1247, 1249, 1250, 1251, 1252, 1253, 1254, 1255, 1256, 1257, 1258, 1259, 1260, 1262, 1271, 1274, 1275, 1276, 1277, 1279, 1280, 1281, 1283, 1284, 1286, 1287, 1288, 1290, 1291, 1293, 1295, 1296, 1298, 1300, 1301, 1302, 1303, 1304, 1306, 1307, 1308, 1312, 1320, 1321, 1322, 1323, 1324, 1325, 1326, 1327, 1328, 1330, 1331, 1332, 1335, 1336, 1337, 1339, 1341, 1343, 1349, 1350, 1351, 1352, 1354, 1356, 1358, 1359, 1360, 1361, 1365, 1366, 1367, 1371, 1372, 1373, 1374, 1375, 1377, 1378, 1379, 1380, 1381, 1382, 1384, 1385, 1386, 1387, 1389, 1390, 1391, 1392, 1393, 1394, 1397, 1398, 1399, 1400, 1401, 1402, 1403, 1404, 1405, 1406, 1407, 1408, 1409, 1410, 1411, 1412, 1417, 1418, 1419, 1420, 1421, 1422, 1423, 1424, 1425, 1426, 1427, 1428, 1429, 1430, 1431, 1432, 1433, 1434, 1435, 1436, 1437, 1438, 1439, 1440, 1441, 1442, 1443, 1444, 1445, 1446, 1447, 1448, 1449, 1450, 1451, 1452, 1453, 1454, 1455, 1456, 1457, 1458, 1459, 1460, 1461, 1462, 1463, 1464, 1465, 1466, 1467, 1468, 1469, 1470, 1471, 1472, 1473, 1474, 1475, 1476, 1477, 1478, 1479, 1480, 1481, 1482, 1483, 1484, 1485, 1486, 1487, 1488, 1489, 1490, 1491, 1492, 1493, 1494, 1495, 1496, 1497, 1498, 1499, and 1500. Such plasmid adapted sequences may further comprise a hairpin-forming motif between the PBS and the 3′ terminal U series.

[0276] Any of the PEgRNAs of Table 10 can be used in a Prime Editing system further comprising a nick guide RNA (ngRNA). Such ngRNA can comprise a spacer comprising nucleotides 5-20 of SEQ ID NO: 18, 19, 20, 21, 22, 23, 24, 25, 26, 27, 28, 29, 30, 31, 32, 33, 34, 35, 36, 37, 38, 39, 40, 41, 42, 43, 44, 45, 46, 47, 48, 49, 50, 51, 52, 53, 54, 55, 56, 57, 58, 59, 60, 61, 62, 63, 64, 65, 66, 67, 68, 69, 70, 71, 72, 199, 200, 203, 529, 736, 737, 738, 739, or 740 and a gRNA core capable of binding to a Cas9 protein. The spacer of the ngRNA can comprise nucleotides 4-20, 3-20, 2-20, or 1-20 of SEQ ID NO: 18, 19, 20, 21, 22, 23, 24, 25, 26, 27, 28, 29, 30, 31, 32, 33, 34, 35, 36, 37, 38, 39, 40, 41, 42, 43, 44, 45, 46, 47, 48, 49, 50, 51, 52, 53, 54, 55, 56, 57, 58, 59, 60, 61, 62, 63, 64, 65, 66, 67, 68, 69, 70, 71, 72, 199, 200, 203, 529, 736, 737, 738, 739, or 740. The spacer of the ngRNA can comprise SEQ ID NO: 18, 19, 20, 21, 22, 23, 24, 25, 26, 27, 28, 29, 30, 31, 32, 33, 34, 35, 36, 37, 38, 39, 40, 41, 42, 43, 44, 45, 46, 47, 48, 49, 50, 51, 52, 53, 54, 55, 56, 57, 58, 59, 60, 61, 62, 63, 64, 65, 66, 67, 68, 69, 70, 71, 72, 199, 200, 203, 529, 736, 737, 738, 739, or 740. The gRNA core of the ngRNA can comprise SEQ ID NO. 5857-5859. Exemplary ngRNA provided in Table 10 can comprise SEQ ID NO: 153, 154, 155, 156, 157, 158, 159, 160, 161, 162, 163, 164, 165, 166, 167, 168, 169, 170, 171, 172, 173, 174, 175, 176, 177, 178, 179, 180, 181, 290, 291, 292, 293, 681, 1501, 1502, 1503, or 1504. Such ngRNA sequences may further comprise a 3′ motif at the 3′ end of the gRNA core, for example, a series of 3, 4 or more U nucleotides. Without being bound by theory, such 3′ motifs are believed to increase ngRNA stability.

[0277] Table 11 provides Prime Editing guide RNAs (PEgRNAs), which can be used in Prime Editing systems disclosed herein. Such Prime Editing systems can comprise a Cas9 protein capable of recognizing an NGG or NG PAM sequence (e.g., AGG or AG), and a reverse transcriptase. The Prime Editing systems (e.g., PE3 or PE3b systems) can further comprise a nick guide RNA (ngRNA). Such PEgRNAs and Prime Editing systems can be used, for example, to correct an 1H1069Q mutation in ATP7B.

[0278] The PEgRNAs of Table 11 comprise: (a) a spacer comprising nucleotides 5-20 of SEQ ID NO: 1505, (b) a gRNA core capable of binding to a Cas9 protein, and (c) an extension arm comprising: (i) an editing template comprising any one of SEQ ID NOs: 1517-1546, and (ii) a primer binding site (PBS) comprising any one of SEQ ID NOs: 1506-1516. The spacer of the PEgRNA can comprise, for example, nucleotides 4-20, 3-20, 2-20, or 1-20 of SEQ ID NO: 1505. The spacer of the PEgRNA can comprise SEQ ID NO: 1505. The RTT and the PBS can comprise respectively SEQ ID NOs: 1517 and 1506, 1517 and 1507, 1517 and 1508, 1517 and 1509, 1517 and 1510, 1517 and 1511, 1517 and 1512, 1517 and 1513, 1517 and 1514, 1517 and 1515, 1517 and 1516, 1518 and 1506, 1518 and 1507, 1518 and 1508, 1518 and 1509, 1518 and 1510, 1518 and 1511, 1518 and 1512, 1518 and 1513, 1518 and 1514, 1518 and 1515, 1518 and 1516, 1519 and 1506, 1519 and 1507, 1519 and 1508, 1519 and 1509, 1519 and 1510, 1519 and 1511, 1519 and 1512, 1519 and 1513, 1519 and 1514, 1519 and 1515, 1519 and 1516, 1520 and 1506, 1520 and 1507, 1520 and 1508, 1520 and 1509, 1520 and 1510, 1520 and 1511, 1520 and 1512, 1520 and 1513, 1520 and 1514, 1520 and 1515, 1520 and 1516, 1521 and 1506, 1521 and 1507, 1521 and 1508, 1521 and 1509, 1521 and 1510, 1521 and 1511, 1521 and 1512, 1521 and 1513, 1521 and 1514, 1521 and 1515, 1521 and 1516, 1522 and 1506, 1522 and 1507, 1522 and 1508, 1522 and 1509, 1522 and 1510, 1522 and 1511, 1522 and 1512, 1522 and 1513, 1522 and 1514, 1522 and 1515, 1522 and 1516, 1523 and 1506, 1523 and 1507, 1523 and 1508, 1523 and 1509, 1523 and 1510, 1523 and 1511, 1523 and 1512, 1523 and 1513, 1523 and 1514, 1523 and 1515, 1523 and 1516, 1524 and 1506, 1524 and 1507, 1524 and 1508, 1524 and 1509, 1524 and 1510, 1524 and 1511, 1524 and 1512, 1524 and 1513, 1524 and 1514, 1524 and 1515, 1524 and 1516, 1525 and 1506, 1525 and 1507, 1525 and 1508, 1525 and 1509, 1525 and 1510, 1525 and 1511, 1525 and 1512, 1525 and 1513, 1525 and 1514, 1525 and 1515, 1525 and 1516, 1526 and 1506, 1526 and 1507, 1526 and 1508, 1526 and 1509, 1526 and 1510, 1526 and 1511, 1526 and 1512, 1526 and 1513, 1526 and 1514, 1526 and 1515, 1526 and 1516, 1527 and 1506, 1527 and 1507, 1527 and 1508, 1527 and 1509, 1527 and 1510, 1527 and 1511, 1527 and 1512, 1527 and 1513, 1527 and 1514, 1527 and 1515, 1527 and 1516, 1528 and 1506, 1528 and 1507, 1528 and 1508, 1528 and 1509, 1528 and 1510, 1528 and 1511, 1528 and 1512, 1528 and 1513, 1528 and 1514, 1528 and 1515, 1528 and 1516, 1529 and 1506, 1529 and 1507, 1529 and 1508, 1529 and 1509, 1529 and 1510, 1529 and 1511, 1529 and 1512, 1529 and 1513, 1529 and 1514, 1529 and 1515, 1529 and 1516, 1530 and 1506, 1530 and 1507, 1530 and 1508, 1530 and 1509, 1530 and 1510, 1530 and 1511, 1530 and 1512, 1530 and 1513, 1530 and 1514, 1530 and 1515, 1530 and 1516, 1531 and 1506, 1531 and 1507, 1531 and 1508, 1531 and 1509, 1531 and 1510, 1531 and 1511, 1531 and 1512, 1531 and 1513, 1531 and 1514, 1531 and 1515, 1531 and 1516, 1532 and 1506, 1532 and 1507, 1532 and 1508, 1532 and 1509, 1532 and 1510, 1532 and 1511, 1532 and 1512, 1532 and 1513, 1532 and 1514, 1532 and 1515, 1532 and 1516, 1533 and 1506, 1533 and 1507, 1533 and 1508, 1533 and 1509, 1533 and 1510, 1533 and 1511, 1533 and 1512, 1533 and 1513, 1533 and 1514, 1533 and 1515, 1533 and 1516, 1534 and 1506, 1534 and 1507, 1534 and 1508, 1534 and 1509, 1534 and 1510, 1534 and 1511, 1534 and 1512, 1534 and 1513, 1534 and 1514, 1534 and 1515, 1534 and 1516, 1535 and 1506, 1535 and 1507, 1535 and 1508, 1535 and 1509, 1535 and 1510, 1535 and 1511, 1535 and 1512, 1535 and 1513, 1535 and 1514, 1535 and 1515, 1535 and 1516, 1536 and 1506, 1536 and 1507, 1536 and 1508, 1536 and 1509, 1536 and 1510, 1536 and 1511, 1536 and 1512, 1536 and 1513, 1536 and 1514, 1536 and 1515, 1536 and 1516, 1537 and 1506, 1537 and 1507, 1537 and 1508, 1537 and 1509, 1537 and 1510, 1537 and 1511, 1537 and 1512, 1537 and 1513, 1537 and 1514, 1537 and 1515, 1537 and 1516, 1538 and 1506, 1538 and 1507, 1538 and 1508, 1538 and 1509, 1538 and 1510, 1538 and 1511, 1538 and 1512, 1538 and 1513, 1538 and 1514, 1538 and 1515, 1538 and 1516, 1539 and 1506, 1539 and 1507, 1539 and 1508, 1539 and 1509, 1539 and 1510, 1539 and 1511, 1539 and 1512, 1539 and 1513, 1539 and 1514, 1539 and 1515, 1539 and 1516, 1540 and 1506, 1540 and 1507, 1540 and 1508, 1540 and 1509, 1540 and 1510, 1540 and 1511, 1540 and 1512, 1540 and 1513, 1540 and 1514, 1540 and 1515, 1540 and 1516, 1541 and 1506, 1541 and 1507, 1541 and 1508, 1541 and 1509, 1541 and 1510, 1541 and 1511, 1541 and 1512, 1541 and 1513, 1541 and 1514, 1541 and 1515, 1541 and 1516, 1542 and 1506, 1542 and 1507, 1542 and 1508, 1542 and 1509, 1542 and 1510, 1542 and 1511, 1542 and 1512, 1542 and 1513, 1542 and 1514, 1542 and 1515, 1542 and 1516, 1543 and 1506, 1543 and 1507, 1543 and 1508, 1543 and 1509, 1543 and 1510, 1543 and 1511, 1543 and 1512, 1543 and 1513, 1543 and 1514, 1543 and 1515, 1543 and 1516, 1544 and 1506, 1544 and 1507, 1544 and 1508, 1544 and 1509, 1544 and 1510, 1544 and 1511, 1544 and 1512, 1544 and 1513, 1544 and 1514, 1544 and 1515, 1544 and 1516, 1545 and 1506, 1545 and 1507, 1545 and 1508, 1545 and 1509, 1545 and 1510, 1545 and 1511, 1545 and 1512, 1545 and 1513, 1545 and 1514, 1545 and 1515, 1545 and 1516, 1546 and 1506, 1546 and 1507, 1546 and 1508, 1546 and 1509, 1546 and 1510, 1546 and 1511, 1546 and 1512, 1546 and 1513, 1546 and 1514, 1546 and 1515, or 1546 and 1516. The gRNA core of the PEgRNA can comprise SEQ ID NO. 5857-5859. Exemplary PEgRNAs provided in Table 11 can comprise SEQ ID NO. 1547, 1548, 1549, 1550, 1551, 1552, 1553, 1554, 1555, 1556, 1557, 1558, 1559, 1560, 1561, 1562, 1563, 1564, 1565, 1566, 1567, 1568, 1569, 1570, 1571, 1572, 1573, 1574, 1575, 1576, 1577, 1578, 1579, 1580, 1581, 1582, 1583, 1584, 1585, 1586, 1587, 1588, 1589, 1590, 1591, 1592, 1593, 1594, 1595, 1596, 1598, 1600, 1601, 1602, 1604, 1606, 1607, 1608, 1609, 1610, 1614, 1615, 1616, 1619, 1620, 1621, 1622, 1623, 1624, 1626, 1628, 1632, 1633, 1634, 1635, 1637, 1640, 1643, 1645, 1646, 1647, 1648, 1649, 1650, 1651, 1653, 1654, 1663, 1664, 1668, 1671, 1678, 1679, 1684, 1686, 1687, 1688, 1691, 1694, 1696, 1697, 1699, 1702, 1708, 1721, 1725, 1728, 1729, 1730, 1731, 1732, 1733, 1737, 1738, 1741, 1742, 1743, 1744, 1745, 1756, 1760, 1761, 1766, 1769, 1770, 1771, 1773, 1777, 1785, 1786, 1788, 1789, 1792, 1796, 1798, 1801, 1803, 1804, 1805, 1806, 1807, 1810, 1813, 1815, 1819, 1824, 1825, 1826, 1830, 1832, 1833, 1835, 1837, 1840, 1841, 1842, 1845, 1846, 1847, 1848, 1850, 1852, 1855, 1856, 1857, 1858, 1859, 1860, 1861, 1862, 1863, 1864, 1865, 1866, 1868, 1870, 1872, 1874, 1876, 1877, 1880, 1882, 1883, 1884, 1888, 1890, 1892, 1893, 1895, 1896, 1902, 1905, 1907, 1908, 1909, 1910, 1911, 1912, 1915, 1918, 1919, 1920, 1921, 1923, 1924, 1928, 1930, 1933, 1935, 1940, 1941, 1943, 1945, 1949, 1954, 1958, 1966, or 1967. Such PEgRNA sequences may further comprise a 3′ motif at the 3′ end of the extension arm, for example, a hairpin-forming motif or a series of 3, 4 or more U nucleotides. Without being bound by theory, such 3′ motifs are believed to increase PEgRNA stability. Such PEgRNA sequences ma alternatively or additionally be adapted for transcription from a DNA template, for example, by including a 5′ terminal G if the spacer of the PEgRNA begins with another nucleotide, by including 6 or 7 U nucleotides at the 3′ end of the extension arm, or both. Exemplary transcription-adapted sequences include SEQ ID NOs: 1597, 1599, 1603, 1605, 1611, 1612, 1613, 1617, 1618, 1625, 1627, 1629, 1630, 1631, 1636, 1638, 1639, 1641, 1642, 1644, 1652, 1655, 1656, 1657, 1658, 1659, 1660, 1661, 1662, 1665, 1666, 1667, 1669, 1670, 1672, 1673, 1674, 1675, 1676, 1677, 1680, 1681, 1682, 1683, 1685, 1689, 1690, 1692, 1693, 1695, 1698, 1700, 1701, 1703, 1704, 1705, 1706, 1707, 1709, 1710, 1711, 1712, 1713, 1714, 1715, 1716, 1717, 1718, 1719, 1720, 1722, 1723, 1724, 1726, 1727, 1734, 1735, 1736, 1739, 1740, 1746, 1747, 1748, 1749, 1750, 1751, 1752, 1753, 1754, 1755, 1757, 1758, 1759, 1762, 1763, 1764, 1765, 1767, 1768, 1772, 1774, 1775, 1776, 1778, 1779, 1780, 1781, 1782, 1783, 1784, 1787, 1790, 1791, 1793, 1794, 1795, 1797, 1799, 1800, 1802, 1808, 1809, 1811, 1812, 1814, 1816, 1817, 1818, 1820, 1821, 1822, 1823, 1827, 1828, 1829, 1831, 1834, 1836, 1838, 1839, 1843, 1844, 1849, 1851, 1853, 1854, 1867, 1869, 1871, 1873, 1875, 1878, 1879, 1881, 1885, 1886, 1887, 1889, 1891, 1894, 1897, 1898, 1899, 1900, 1901, 1903, 1904, 1906, 1913, 1914, 1916, 1917, 1922, 1925, 1926, 1927, 1929, 1931, 1932, 1934, 1936, 1937, 1938, 1939, 1942, 1944, 1946, 1947, 1948, 1950, 1951, 1952, 1953, 1955, 1956, 1957, 1959, 1960, 1961, 1962, 1963, 1964, 1965, 1968, 1969, 1970, 1971, 1972, 1973, 1974, 1975, 1976, 1977, 1978, 1979, 1980, 1981, 1982, 1983, 1984, 1985, 1986, 1987, 1988, 1989, 1990, 1991, 1992, 1993, 1994, 1995, 1996, 1997, 1998, 1999, 2000, 2001, 2002, 2003, 2004, 2005, 2006, 2007, 2008, 2009, 2010, 2011, 2012, 2013, 2014, 2015, 2016, 2017, 2018, 2019, 2020, 2021, and 2022. Such plasmid adapted sequences may further comprise a hairpin-forming motif between the PBS and the 3′ terminal U series.

[0279] Any of the PEgRNAs of Table 11 can be used in a Prime Editing system further comprising a nick guide RNA (ngRNA). Such ngRNA can comprise a spacer comprising nucleotides 5-20 of SEQ ID NO: 18, 19, 20, 21, 22, 23, 24, 25, 26, 27, 28, 29, 30, 31, 32, 33, 34, 35, 36, 37, 38, 39, 40, 41, 42, 43, 44, 45, 46, 47, 48, 49, 50, 51, 52, 53, 54, 55, 56, 57, 58, 59, 60, 61, 62, 63, 64, 65, 66, 67, 68, 69, 70, 71, 72, 199, 200, 203, 529, 736, 737, 738, 739, or 740 and a gRNA core capable of binding to a Cas9 protein. The spacer of the ngRNA can comprise nucleotides 4-20, 3-20, 2-20, or 1-20 of SEQ ID NO: 18, 19, 20, 21, 22, 23, 24, 25, 26, 27, 28, 29, 30, 31, 32, 33, 34, 35, 36, 37, 38, 39, 40, 41, 42, 43, 44, 45, 46, 47, 48, 49, 50, 51, 52, 53, 54, 55, 56, 57, 58, 59, 60, 61, 62, 63, 64, 65, 66, 67, 68, 69, 70, 71, 72, 199, 200, 203, 529, 736, 737, 738, 739, or 740. The spacer of the ngRNA can comprise SEQ ID NO: 18, 19, 20, 21, 22, 23, 24, 25, 26, 27, 28, 29, 30, 31, 32, 33, 34, 35, 36, 37, 38, 39, 40, 41, 42, 43, 44, 45, 46, 47, 48, 49, 50, 51, 52, 53, 54, 55, 56, 57, 58, 59, 60, 61, 62, 63, 64, 65, 66, 67, 68, 69, 70, 71, 72, 199, 200, 203, 529, 736, 737, 738, 739, or 740. The gRNA core of the ngRNA can comprise SEQ ID NO. 5857-5859. Exemplary ngRNA provided in Table 11 can comprise SEQ ID NO: 153, 154, 155, 156, 157, 158, 159, 160, 161, 162, 163, 164, 165, 166, 167, 168, 169, 170, 171, 172, 173, 174, 175, 176, 177, 178, 179, 180, 181, 290, 291, 292, 293, 681, 1501, 1502, 1503, or 1504. Such ngRNA sequences may further comprise a 3′ motif at the 3′ end of the gRNA core, for example, a series of 3, 4 or more U nucleotides. Without being bound by theory, such 3′ motifs are believed to increase ngRNA stability.

[0280] Table 12 provides Prime Editing guide RNAs (PEgRNAs), which can be used in Prime Editing systems disclosed herein. Such Prime Editing systems can comprise a Cas9 protein capable of recognizing an NGG or NG PAM sequence (e.g., TGG or TG), and a reverse transcriptase. The Prime Editing systems (e.g., PE3 or PE3b systems) can further comprise a nick guide RNA (ngRNA). Such PEgRNAs and Prime Editing systems can be used, for example, to correct an H1069Q mutation in ATP7B.

[0281] The PEgRNAs of Table 12 comprise: (a) a spacer comprising nucleotides 5-20 of SEQ ID NO: 2023, (b) a gRNA core capable of binding to a Cas9 protein, and (c) an extension arm comprising: (i) an editing template comprising any one of SEQ ID NOs: 2035-2044, and (ii) a primer binding site (PBS) comprising any one of SEQ ID NOs: 2024-2034. The spacer of the PEgRNA can comprise, for example, nucleotides 4-20, 3-20, 2-20, or 1-20 of SEQ ID NO: 2023. The spacer of the PEgRNA can comprise SEQ ID NO: 2023. The RTT and the PBS can comprise respectively SEQ ID NO: 2035 and 2024, 2035 and 2025, 2035 and 2026, 2035 and 2027, 2035 and 2028, 2035 and 2029, 2035 and 2030, 2035 and 2031, 2035 and 2032, 2035 and 2033, 2035 and 2034, 2036 and 2024, 2036 and 2025, 2036 and 2026, 2036 and 2027, 2036 and 2028, 2036 and 2029, 2036 and 2030, 2036 and 2031, 2036 and 2032, 2036 and 2033, 2036 and 2034, 2037 and 2024, 2037 and 2025, 2037 and 2026, 2037 and 2027, 2037 and 2028, 2037 and 2029, 2037 and 2030, 2037 and 2031, 2037 and 2032, 2037 and 2033, 2037 and 2034, 2038 and 2024, 2038 and 2025, 2038 and 2026, 2038 and 2027, 2038 and 2028, 2038 and 2029, 2038 and 2030, 2038 and 2031, 2038 and 2032, 2038 and 2033, 2038 and 2034, 2039 and 2024, 2039 and 2025, 2039 and 2026, 2039 and 2027, 2039 and 2028, 2039 and 2029, 2039 and 2030, 2039 and 2031, 2039 and 2032, 2039 and 2033, 2039 and 2034, 2040 and 2024, 2040 and 2025, 2040 and 2026, 2040 and 2027, 2040 and 2028, 2040 and 2029, 2040 and 2030, 2040 and 2031, 2040 and 2032, 2040 and 2033, 2040 and 2034, 2041 and 2024, 2041 and 2025, 2041 and 2026, 2041 and 2027, 2041 and 2028, 2041 and 2029, 2041 and 2030, 2041 and 2031, 2041 and 2032, 2041 and 2033, 2041 and 2034, 2042 and 2024, 2042 and 2025, 2042 and 2026, 2042 and 2027, 2042 and 2028, 2042 and 2029, 2042 and 2030, 2042 and 2031, 2042 and 2032, 2042 and 2033, 2042 and 2034, 2043 and 2024, 2043 and 2025, 2043 and 2026, 2043 and 2027, 2043 and 2028, 2043 and 2029, 2043 and 2030, 2043 and 2031, 2043 and 2032, 2043 and 2033, 2043 and 2034, 2044 and 2024, 2044 and 2025, 2044 and 2026, 2044 and 2027, 2044 and 2028, 2044 and 2029, 2044 and 2030, 2044 and 2031, 2044 and 2032, 2044 and 2033, or 2044 and 2034. The gRNA core of the PEgRNA can comprise SEQ ID NO. 5857-5859. Exemplary PEgRNAs provided in Table 12 can comprise SEQ ID NO. 2097, 2098, 2099, 2100, 2101, 2102, 2103, 2104, 2105, 2106, 2107, 2108, 2109, 2110, 2111, 2112, 2113, 2114, 2115, 2116, 2117, 2118, 2119, 2120, 2121, 2122, 2123, 2124, 2125, 2126, 2127, 2128, 2129, 2131, 2132, 2133, 2134, 2135, 2136, 2137, 2138, 2140, 2142, 2144, 2145, 2146, 2147, 2148, 2149, 2150, 2151, 2154, 2155, 2156, 2158, 2160, 2161, 2165, 2166, 2167, 2168, 2169, 2170, 2171, 2174, 2178, 2179, 2183, 2187, 2194, 2195, 2197, 2199, 2200, 2202, 2207, 2208, 2220, 2226, or 2232. Such PEgRNA sequences may further comprise a 3Y motif at the 3′ end of the extension arm, for example, a hairpin-forming motif or a series of 3, 4 or more U nucleotides. Without being bound by theory, such 3′ motifs are believed to increase PEgRNA stability. Such PEgRNA sequences may alternatively or additionally be adapted for transcription from a DNA template, for example, by including a 5′ terminal G if the spacer of the PEgRNA begins with another nucleotide, by including 6 or 7 U nucleotides at the 3′ end of the extension arm, or both. Exemplary transcription-adapted sequences include SEQ ID NOs: 2130, 2139, 2141, 2143, 2152, 2153, 2157, 2159, 2162, 2163, 2164, 2172, 2173, 2175, 2176, 2177, 2180, 2181, 2182, 2184, 2185, 2186, 2188, 2189, 2190, 2191, 2192, 2193, 2196, 2198, 2201, 2203, 2204, 2205, 2206, 2209, 2210, 2211, 2212, 2213, 2214, 2215, 2216, 2217, 2218, 2219, 2221, 2222, 2223, 2224, 2225, 2227, 2228, 2229, 2230, 2231, 2233, 2234, 2235, 2236, 2237, 2238, 2239, 2240, 2241, 2242, 2243, 2244, 2245, 2246, 2247, 2248, 2249, 2250, 2251, 2252, 2253, 2254, 2255, and 2256. Such plasmid adapted sequences may further comprise a hairpin-forming motif between the PBS and the 3′ terminal U series.

[0282] Any of the PEgRNAs of Table 12 can be used in a Prime Editing system further comprising a nick guide RNA (ngRNA). Such ngRNA can comprise a spacer comprising nucleotides 5-20 of SEQ ID NO: 41, 60, 61, 62, 63, 64, 65, 66, 69, 71, 2045, 2046, 2047, 2048, 2049, 2050, 2051, 2052, 2053, 2054, 2055, 2056, 2057, 2058, 2059, 2060, 2061, 2062, 2063, 2064, 2065, 2066, 2067, 2068, 2069, 2070, 2071, 2072, 2073, 2074, 2075, 2076, 2077, 2078, 2079, 2080, 2081, 2082, 2083, 2084, 2085, 2086, 2087, 2088, 2089, 2090, 2091, 2092, 2093, 2094, 2095, or 2096 and a gRNA core capable of binding to a Cas9 protein. The spacer of the ngRNA can comprise nucleotides 4-20, 3-20, 2-20, or 1-20 of SEQ ID NO: 41, 60, 61, 62, 63, 64, 65, 66, 69, 71, 2045, 2046, 2047, 2048, 2049, 2050, 2051, 2052, 2053, 2054, 2055, 2056, 2057, 2058, 2059, 2060, 2061, 2062, 2063, 2064, 2065, 2066, 2067, 2068, 2069, 2070, 2071, 2072, 2073, 2074, 2075, 2076, 2077, 2078, 2079, 2080, 2081, 2082, 2083, 2084, 2085, 2086, 2087, 2088, 2089, 2090, 2091, 2092, 2093, 2094, 2095, or 2096. The spacer of the ngRNA can comprise SEQ ID NO: 41, 60, 61, 62, 63, 64, 65, 66, 69, 71, 2045, 2046, 2047, 2048, 2049, 2050, 2051, 2052, 2053, 2054, 2055, 2056, 2057, 2058, 2059, 2060, 2061, 2062, 2063, 2064, 2065, 2066, 2067, 2068, 2069, 2070, 2071, 2072, 2073, 2074, 2075, 2076, 2077, 2078, 2079, 2080, 2081, 2082, 2083, 2084, 2085, 2086, 2087, 2088, 2089, 2090, 2091, 2092, 2093, 2094, 2095, or 2096. The gRNA core of the ngRNA can comprise SEQ ID NO. 5857-5859. Exemplary ngRNA provided in Table 12 can comprise any one of SEQ ID NOs: 2257-2289. Such ngRNA sequences may further comprise a 3′ motif at the 3′ end of the gRNA core, for example, a series of 3, 4 or more U nucleotides. Exemplary ngRNA sequences with such 3′ adaptations include SEQ ID NOs: 2290-2292. Without being bound by theory, such 3′ motifs are believed to increase ngRNA stability.

[0283] Table 15 provides Prime Editing guide RNAs (PEgRNAs), which can be used in Prime Editing systems disclosed herein. Such Prime Editing systems can comprise a Cas9 protein capable of recognizing an NGG, NG, or NNGG PAM sequence (e.g., AGG, AG, or AGGG), and a reverse transcriptase. The Prime Editing systems (e.g., PE3 or PE3b systems) can further comprise a nick guide RNA (ngRNA). Such PEgRNAs and Prime Editing systems can be used, for example, to correct an H1069Q mutation in ATP7B.

[0284] The PEgRNAs of Table 15 comprise: (a) a spacer comprising nucleotides 5-20 of SEQ ID NO: 2293, (b) a gRNA core capable of binding to a Cas9 protein, and (c) an extension arm comprising: (i) an editing template comprising any one of SEQ ID NOs: 2305-2422, and (ii) a primer binding site (PBS) comprising any one of SEQ ID NOs: 2294-2304. The spacer of the PEgRNA can comprise, for example, nucleotides 4-20, 3-20, 2-20, or 1-20 of SEQ ID NO: 2293. The spacer of the PEgRNA can comprise SEQ ID NO: 2293. The RTT and the PBS can comprise respectively SEQ ID NOs: 2305 and 2294, 2305 and 2295, 2305 and 2296, 2305 and 2297, 2305 and 2298, 2305 and 2299, 2305 and 2300, 2305 and 2301, 2305 and 2302, 2305 and 2303, 2305 and 2304, 2306 and 2294, 2306 and 2295, 2306 and 2296, 2306 and 2297, 2306 and 2298, 2306 and 2299, 2306 and 2300, 2306 and 2301, 2306 and 2302, 2306 and 2303, 2306 and 2304, 2307 and 2294, 2307 and 2295, 2307 and 2296, 2307 and 2297, 2307 and 2298, 2307 and 2299, 2307 and 2300, 2307 and 2301, 2307 and 2302, 2307 and 2303, 2307 and 2304, 2308 and 2294, 2308 and 2295, 2308 and 2296, 2308 and 2297, 2308 and 2298, 2308 and 2299, 2308 and 2300, 2308 and 2301, 2308 and 2302, 2308 and 2303, 2308 and 2304, 2309 and 2294, 2309 and 2295, 2309 and 2296, 2309 and 2297, 2309 and 2298, 2309 and 2299, 2309 and 2300, 2309 and 2301, 2309 and 2302, 2309 and 2303, 2309 and 2304, 2310 and 2294, 2310 and 2295, 2310 and 2296, 2310 and 2297, 2310 and 2298, 2310 and 2299, 2310 and 2300, 2310 and 2301, 2310 and 2302, 2310 and 2303, 2310 and 2304, 2311 and 2294, 2311 and 2295, 2311 and 2296, 2311 and 2297, 2311 and 2298, 2311 and 2299, 2311 and 2300, 2311 and 2301, 2311 and 2302, 2311 and 2303, 2311 and 2304, 2312 and 2294, 2312 and 2295, 2312 and 2296, 2312 and 2297, 2312 and 2298, 2312 and 2299, 2312 and 2300, 2312 and 2301, 2312 and 2302, 2312 and 2303, 2312 and 2304, 2313 and 2294, 2313 and 2295, 2313 and 2296, 2313 and 2297, 2313 and 2298, 2313 and 2299, 2313 and 2305, 2313 and 2301, 2313 and 2302, 2313 and 2303, 2313 and 2304, 2314 and 2294, 2314 and 2295, 2314 and 2296, 2314 and 2297, 2314 and 2298, 2314 and 2299, 2314 and 2300, 2314 and 2301, 2314 and 2302, 2314 and 2303, 2314 and 2304, 2315 and 2294, 2315 and 2295, 2315 and 2296, 2315 and 2297, 2315 and 2298, 2315 and 2299, 2315 and 2300, 2315 and 2301, 2315 and 2302, 2315 and 2303, 2315 and 2304, 2316 and 2294, 2316 and 2295, 2316 and 2296, 2316 and 2297, 2316 and 2298, 2316 and 2299, 2316 and 2300, 2316 and 2301, 2316 and 2302, 2316 and 2303, 2316 and 2304, 2317 and 2294, 2317 and 2295, 2317 and 2296, 2317 and 2297, 2317 and 2298, 2317 and 2299, 2317 and 2300, 2317 and 2301, 2317 and 2302, 2317 and 2303, 2317 and 2304, 2318 and 2294, 2318 and 2295, 2318 and 2296, 2318 and 2297, 2318 and 2298, 2318 and 2299, 2318 and 2300, 2318 and 2301, 2318 and 2302, 2318 and 2303, 2318 and 2304, 2319 and 2294, 2319 and 2295, 2319 and 2296, 2319 and 2297, 2319 and 2298, 2319 and 2299, 2319 and 2300, 2319 and 2301, 2319 and 2302, 2319 and 2303, 2319 and 2304, 2320 and 2294, 2320 and 2295, 2320 and 2296, 2320 and 2297, 2320 and 2298, 2320 and 2299, 2320 and 2300, 2320 and 2301, 2320 and 2302, 2320 and 2303, 2320 and 2304, 2321 and 2294, 2321 and 2295, 2321 and 2296, 2321 and 2297, 2321 and 2298, 2321 and 2299, 2321 and 2300, 2321 and 2301, 2321 and 2302, 2321 and 2303, 2321 and 2304, 2322 and 2294, 2322 and 2295, 2322 and 2296, 2322 and 2297, 2322 and 2298, 2322 and 2299, 2322 and 2300, 2322 and 2301, 2322 and 2302, 2322 and 2303, 2322 and 2304, 2323 and 2294, 2323 and 2295, 2323 and 2296, 2323 and 2297, 2323 and 2298, 2323 and 2299, 2323 and 23004, 2323 and 2301, 2323 and 2302, 2323 and 2303, 2323 and 2304, 2324 and 2294, 2324 and 2295, 2324 and 2296, 2324 and 2297, 2324 and 2298, 2324 and 2299, 2324 and 2300, 2324 and 2301, 2324 and 2302, 2324 and 2303, 2324 and 2304, 2325 and 2294, 2325 and 2295, 2325 and 2296, 2325 and 2297, 2325 and 2298, 2325 and 2299, 2325 and 2300, 2325 and 2301, 2325 and 2302, 2325 and 2303, 2325 and 2304, 2326 and 2294, 2326 and 2295, 2326 and 2296, 2326 and 2297, 2326 and 2298, 2326 and 2299, 2326 and 2300, 2326 and 2301, 2326 and 2302, 2326 and 2303, 2326 and 2304, 2327 and 2294, 2327 and 2295, 2327 and 2296, 2327 and 2297, 2327 and 2298, 2327 and 2299, 2327 and 2300, 2327 and 2301, 2327 and 2302, 2327 and 2303, 2327 and 2304, 2328 and 2294, 2328 and 2295, 2328 and 2296, 2328 and 2297, 2328 and 2298, 2328 and 2299, 2328 and 2300, 2328 and 2301, 2328 and 2302, 2328 and 2303, 2328 and 2304, 2329 and 2294, 2329 and 2295, 2329 and 2296, 2329 and 2297, 2329 and 2298, 2329 and 2299, 2329 and 2300, 2329 and 2301, 2329 and 2302, 2329 and 2303, 2329 and 2304, 2330 and 2294, 2330 and 2295, 2330 and 2296, 2330 and 2297, 2330 and 2298, 2330 and 2299, 2330 and 2300, 2330 and 2301, 2330 and 2302, 2330 and 2303, 2330 and 2304, 2331 and 2294, 2331 and 2295, 2331 and 2296, 2331 and 2297, 2331 and 2298, 2331 and 2299, 2331 and 2300, 2331 and 2301, 2331 and 2302, 2331 and 2303, 2331 and 2304, 2332 and 2294, 2332 and 2295, 2332 and 2296, 2332 and 2297, 2332 and 2298, 2332 and 2299, 2332 and 2300, 2332 and 2301, 2332 and 2302, 2332 and 2303, 2332 and 2304, 2333 and 2294, 2333 and 2295, 2333 and 2296, 2333 and 2297, 2333 and 2298, 2333 and 2299, 2333 and 2300, 2333 and 2301, 2333 and 2302, 2333 and 2303, 2333 and 2304, 2334 and 2294, 2334 and 2295, 2334 and 2296, 2334 and 2297, 2334 and 2298, 2334 and 2299, 2334 and 2300, 2334 and 2301, 2334 and 2302, 2334 and 2303, 2334 and 2304, 2335 and 2294, 2335 and 2295, 2335 and 2296, 2335 and 2297, 2335 and 2298, 2335 and 2299, 2335 and 2300, 2335 and 2301, 2335 and 2302, 2335 and 2303, 2335 and 2304, 2336 and 2294, 2336 and 2295, 2336 and 2296, 2336 and 2297, 2336 and 2298, 2336 and 2299, 2336 and 2300, 2336 and 2301, 2336 and 2302, 2336 and 2303, 2336 and 2304, 2337 and 2294, 2337 and 2295, 2337 and 2296, 2337 and 2297, 2337 and 2298, 2337 and 2299, 2337 and 2300, 2337 and 2301, 2337 and 2302, 2337 and 2303, 2337 and 2304, 2338 and 2294, 2338 and 2295, 2338 and 2296, 2338 and 2297, 2338 and 2298, 2338 and 2299, 2338 and 2300, 2338 and 2301, 2338 and 2302, 2338 and 2303, 2338 and 2304, 2339 and 2294, 2339 and 2295, 2339 and 2296, 2339 and 2297, 2339 and 2298, 2339 and 2299, 2339 and 2300, 2339 and 2301, 2339 and 2302, 2339 and 2303, 2339 and 2304, 2340 and 2294, 2340 and 2295, 2340 and 2296, 2340 and 2297, 2340 and 2298, 2340 and 2299, 2340 and 2300, 2340 and 2301, 2340 and 2302, 2340 and 2303, 2340 and 2304, 2341 and 2294, 2341 and 2295, 2341 and 2296, 2341 and 2297, 2341 and 2298, 2341 and 2299, 2341 and 2300, 2341 and 2301, 2341 and 2302, 2341 and 2303, 2341 and 2304, 2342 and 2294, 2342 and 2295, 2342 and 2296, 2342 and 2297, 2342 and 2298, 2342 and 2299, 2342 and 2300, 2342 and 2301, 2342 and 2302, 2342 and 2303, 2342 and 2304, 2343 and 2294, 2343 and 2295, 2343 and 2296, 2343 and 2297, 2343 and 2298, 2343 and 2299, 2343 and 2300, 2343 and 2301, 2343 and 2302, 2343 and 2303, 2343 and 2304, 2344 and 2294, 2344 and 2295, 2344 and 2296, 2344 and 2297, 2344 and 2298, 2344 and 2299, 2344 and 2300, 2344 and 2301, 2344 and 2302, 2344 and 2303, 2344 and 2304, 2345 and 2294, 2345 and 2295, 2345 and 2296, 2345 and 2297, 2345 and 2298, 2345 and 2299, 2345 and 2300, 2345 and 2301, 2345 and 2302, 2345 and 2303, 2345 and 2304, 2346 and 2294, 2346 and 2295, 2346 and 2296, 2346 and 2297, 2346 and 2298, 2346 and 2299, 2346 and 2300, 2346 and 2301, 2346 and 2302, 2346 and 2303, 2346 and 2304, 2347 and 2294, 2347 and 2295, 2347 and 2296, 2347 and 2297, 2347 and 2298, 2347 and 2299, 2347 and 2300, 2347 and 2301, 2347 and 2302, 2347 and 2303, 2347 and 2304, 2348 and 2294, 2348 and 2295, 2348 and 2296, 2348 and 2297, 2348 and 2298, 2348 and 2299, 2348 and 2300, 2348 and 2301, 2348 and 2302, 2348 and 2303, 2348 and 2304, 2349 and 2294, 2349 and 2295, 2349 and 2296, 2349 and 2297, 2349 and 2298, 2349 and 2299, 2349 and 230, 2349 and 2301, 2349 and 2302, 2349 and 2303, 2349 and 2304, 2350 and 2294, 2350 and 2295, 2350 and 2296, 2350 and 2297, 2350 and 2298, 2350 and 2299, 2350 and 2300, 2350 and 2301, 2350 and 2302, 2350 and 2303, 2350 and 2304, 2351 and 2294, 2351 and 2295, 2351 and 2296, 2351 and 2297, 2351 and 2298, 2351 and 2299, 2351 and 2300, 2351 and 2301, 2351 and 2302, 2351 and 2303, 2351 and 2304, 2352 and 2294, 2352 and 2295, 2352 and 2296, 2352 and 2297, 2352 and 2298, 2352 and 2299, 2352 and 2300, 2352 and 2301, 2352 and 2302, 2352 and 2303, 2352 and 2304, 2353 and 2294, 2353 and 2295, 2353 and 2296, 2353 and 2297, 2353 and 2298, 2353 and 2299, 2353 and 2300, 2353 and 2301, 2353 and 2302, 2353 and 2303, 2353 and 2304, 2354 and 2294, 2354 and 2295, 2354 and 2296, 2354 and 2297, 2354 and 2298, 2354 and 2299, 2354 and 2300, 2354 and 2301, 2354 and 2302, 2354 and 2303, 2354 and 2304, 2355 and 2294, 2355 and 2295, 2355 and 2296, 2355 and 2297, 2355 and 2298, 2355 and 2299, 2355 and 2300, 2355 and 2301, 2355 and 2302, 2355 and 2303, 2355 and 2304, 2356 and 2294, 2356 and 2295, 2356 and 2296, 2356 and 2297, 2356 and 2298, 2356 and 2299, 2356 and 2300, 2356 and 2301, 2356 and 2302, 2356 and 2303, 2356 and 2304, 2357 and 2294, 2357 and 2295, 2357 and 2296, 2357 and 2297, 2357 and 2298, 2357 and 2299, 2357 and 2300, 2357 and 2301, 2357 and 2302, 2357 and 2303, 2357 and 2304, 2358 and 2294, 2358 and 2295, 2358 and 2296, 2358 and 2297, 2358 and 2298, 2358 and 2299, 2358 and 2300, 2358 and 2301, 2358 and 2302, 2358 and 2303, 2358 and 2304, 2359 and 2294, 2359 and 2295, 2359 and 2296, 2359 and 2297, 2359 and 2298, 2359 and 2299, 2359 and 2300, 2359 and 2301, 2359 and 2302, 2359 and 2303, 2359 and 2304, 2360 and 2294, 2360 and 2295, 2360 and 2296, 2360 and 2297, 2360 and 2298, 2360 and 2299, 2360 and 2300, 2360 and 2301, 2360 and 2302, 2360 and 2303, 2360 and 2304, 2361 and 2294, 2361 and 2295, 2361 and 2296, 2361 and 2297, 2361 and 2298, 2361 and 2299, 2361 and 2300, 2361 and 2301, 2361 and 2302, 2361 and 2303, 2361 and 2304, 2362 and 2294, 2362 and 2295, 2362 and 2296, 2362 and 2297, 2362 and 2298, 2362 and 2299, 2362 and 2300, 2362 and 2301, 2362 and 2302, 2362 and 2303, 2362 and 2304, 2363 and 2294, 2363 and 2295, 2363 and 2296, 2363 and 2297, 2363 and 2298, 2363 and 2299, 2363 and 2300, 2363 and 2301, 2363 and 2302, 2363 and 2303, 2363 and 2304, 2364 and 2294, 2364 and 2295, 2364 and 2296, 2364 and 2297, 2364 and 2298, 2364 and 2299, 2364 and 2300, 2364 and 2301, 2364 and 2302, 2364 and 2303, 2364 and 2304, 2365 and 2294, 2365 and 2295, 2365 and 2296, 2365 and 2297, 2365 and 2298, 2365 and 2299, 2365 and 2300, 2365 and 2301, 2365 and 2302, 2365 and 2303, 2365 and 2304, 2366 and 2294, 2366 and 2295, 2366 and 2296, 2366 and 2297, 2366 and 2298, 2366 and 2299, 2366 and 2300, 2366 and 2301, 2366 and 2302, 2366 and 2303, 2366 and 2304, 2367 and 2294, 2367 and 2295, 2367 and 2296, 2367 and 2297, 2367 and 2298, 2367 and 2299, 2367 and 2300, 2367 and 2301, 2367 and 2302, 2367 and 2303, 2367 and 2304, 2368 and 2294, 2368 and 2295, 2368 and 2296, 2368 and 2297, 2368 and 2298, 2368 and 2299, 2368 and 2300, 2368 and 2301, 2368 and 2302, 2368 and 2303, 2368 and 2304, 2369 and 2294, 2369 and 2295, 2369 and 2296, 2369 and 2297, 2369 and 2298, 2369 and 2299, 2369 and 2300, 2369 and 2301, 2369 and 2302, 2369 and 2303, 2369 and 2304, 2370 and 2294, 2370 and 2295, 2370 and 2296, 2370 and 2297, 2370 and 2298, 2370 and 2299, 2370 and 2300, 2370 and 2301, 2370 and 2302, 2370 and 2303, 2370 and 2304, 2371 and 2294, 2371 and 2295, 2371 and 2296, 2371 and 2297, 2371 and 2298, 2371 and 2299, 2371 and 2300, 2371 and 2301, 2371 and 2302, 2371 and 2303, 2371 and 2304, 2372 and 2294, 2372 and 2295, 2372 and 2296, 2372 and 2297, 2372 and 2298, 2372 and 2299, 2372 and 2300, 2372 and 2301, 2372 and 2302, 2372 and 2303, 2372 and 2304, 2373 and 2294, 2373 and 2295, 2373 and 2296, 2373 and 2297, 2373 and 2298, 2373 and 2299, 2373 and 2300, 2373 and 2301, 2373 and 2302, 2373 and 2303, 2373 and 2304, 2374 and 2294, 2374 and 2295, 2374 and 2296, 2374 and 2297, 2374 and 2298, 2374 and 2299, 2374 and 2300, 2374 and 2301, 2374 and 2302, 2374 and 2303, 2374 and 2304, 2375 and 2294, 2375 and 2295, 2375 and 2296, 2375 and 2297, 2375 and 2298, 2375 and 2299, 2375 and 2300, 2375 and 2301, 2375 and 2302, 2375 and 2303, 2375 and 2304, 2376 and 2294, 2376 and 2295, 2376 and 2296, 2376 and 2297, 2376 and 2298, 2376 and 2299, 2376 and 2300, 2376 and 2301, 2376 and 2302, 2376 and 2303, 2376 and 2304, 2377 and 2294, 2377 and 2295, 2377 and 2296, 2377 and 2297, 2377 and 2298, 2377 and 2299, 2377 and 2300, 2377 and 2301, 2377 and 2302, 2377 and 2303, 2377 and 2304, 2378 and 2294, 2378 and 2295, 2378 and 2296, 2378 and 2297, 2378 and 2298, 2378 and 2299, 2378 and 2300, 2378 and 2301, 2378 and 2302, 2378 and 2303, 2378 and 2304, 2379 and 2294, 2379 and 2295, 2379 and 2296, 2379 and 2297, 2379 and 2298, 2379 and 2299, 2379 and 2300, 2379 and 2301, 2379 and 2302, 2379 and 2303, 2379 and 2304, 2380 and 2294, 2380 and 2295, 2380 and 2296, 2380 and 2297, 2380 and 2298, 2380 and 2299, 2380 and 2300, 2380 and 2301, 2380 and 2302, 2380 and 2303, 2380 and 2304, 2381 and 2294, 2381 and 2295, 2381 and 2296, 2381 and 2297, 2381 and 2298, 2381 and 2299, 2381 and 2300, 2381 and 2301, 2381 and 2302, 2381 and 2303, 2381 and 2304, 2382 and 2294, 2382 and 2295, 2382 and 2296, 2382 and 2297, 2382 and 2298, 2382 and 2299, 2382 and 2300, 2382 and 2301, 2382 and 2302, 2382 and 2303, 2382 and 2304, 2383 and 2294, 2383 and 2295, 2383 and 2296, 2383 and 2297, 2383 and 2298, 2383 and 2299, 2383 and 2300, 2383 and 2301, 2383 and 2302, 2383 and 2303, 2383 and 2304, 2384 and 2294, 2384 and 2295, 2384 and 2296, 2384 and 2297, 2384 and 2298, 2384 and 2299, 2384 and 2300, 2384 and 2301, 2384 and 2302, 2384 and 2303, 2384 and 2304, 2385 and 2294, 2385 and 2295, 2385 and 2296, 2385 and 2297, 2385 and 2298, 2385 and 2299, 2385 and 2300, 2385 and 2301, 2385 and 2302, 2385 and 2303, 2385 and 2304, 2386 and 2294, 2386 and 2295, 2386 and 2296, 2386 and 2297, 2386 and 2298, 2386 and 2299, 2386 and 2300, 2386 and 2301, 2386 and 2302, 2386 and 2303, 2386 and 2304, 2387 and 2294, 2387 and 2295, 2387 and 2296, 2387 and 2297, 2387 and 2298, 2387 and 2299, 2387 and 2300, 2387 and 2301, 2387 and 2302, 2387 and 2303, 2387 and 2304, 2388 and 2294, 2388 and 2295, 2388 and 2296, 2388 and 2297, 2388 and 2298, 2388 and 2299, 2388 and 2300, 2388 and 2301, 2388 and 2302, 2388 and 2303, 2388 and 2304, 2389 and 2294, 2389 and 2295, 2389 and 2296, 2389 and 2297, 2389 and 2298, 2389 and 2299, 2389 and 2300, 2389 and 2301, 2389 and 2302, 2389 and 2303, 2389 and 2304, 2390 and 2294, 2390 and 2295, 2390 and 2296, 2390 and 2297, 2390 and 2298, 2390 and 2299, 2390 and 2300, 2390 and 2301, 2390 and 2302, 2390 and 2303, 2390 and 2304, 2391 and 2294, 2391 and 2295, 2391 and 2296, 2391 and 2297, 2391 and 2298, 2391 and 2299, 2391 and 2300, 2391 and 2301, 2391 and 2302, 2391 and 2303, 2391 and 2304, 2392 and 2294, 2392 and 2295, 2392 and 2296, 2392 and 2297, 2392 and 2298, 2392 and 2299, 2392 and 2300, 2392 and 2301, 2392 and 2302, 2392 and 2303, 2392 and 2304, 2393 and 2294, 2393 and 2295, 2393 and 2296, 2393 and 2297, 2393 and 2298, 2393 and 2299, 2393 and 2300, 2393 and 2301, 2393 and 2302, 2393 and 2303, 2393 and 2304, 2394 and 2294, 2394 and 2295, 2394 and 2296, 2394 and 2297, 2394 and 2298, 2394 and 2299, 2394 and 2300, 2394 and 2301, 2394 and 2302, 2394 and 2303, 2394 and 2304, 2395 and 2294, 2395 and 2295, 2395 and 2296, 2395 and 2297, 2395 and 2298, 2395 and 2299, 2395 and 2300, 2395 and 2301, 2395 and 2302, 2395 and 2303, 2395 and 2304, 2396 and 2294, 2396 and 2295, 2396 and 2296, 2396 and 2297, 2396 and 2298, 2396 and 2299, 2396 and 2300, 2396 and 2301, 2396 and 2302, 2396 and 2303, 2396 and 2304, 2397 and 2294, 2397 and 2295, 2397 and 2296, 2397 and 2297, 2397 and 2298, 2397 and 2299, 2397 and 2300, 2397 and 2301, 2397 and 2302, 2397 and 2303, 2397 and 2304, 2398 and 2294, 2398 and 2295, 2398 and 2296, 2398 and 2297, 2398 and 2298, 2398 and 2299, 2398 and 2300, 2398 and 2301, 2398 and 2302, 2398 and 2303, 2398 and 2304, 2399 and 2294, 2399 and 2295, 2399 and 2296, 2399 and 2297, 2399 and 2298, 2399 and 2299, 2399 and 2300, 2399 and 2301, 2399 and 2302, 2399 and 2303, 2399 and 2304, 2400 and 2294, 2400 and 2295, 2400 and 2296, 2400 and 2297, 2400 and 2298, 2400 and 2299, 2400 and 2300, 2400 and 2301, 2400 and 2302, 2400 and 2303, 2400 and 2304, 2401 and 2294, 2401 and 2295, 2401 and 2296, 2401 and 2297, 2401 and 2298, 2401 and 2299, 2401 and 2300, 2401 and 2301, 2401 and 2302, 2401 and 2303, 2401 and 2304, 2402 and 2294, 2402 and 2295, 2402 and 2296, 2402 and 2297, 2402 and 2298, 2402 and 2299, 2402 and 2300, 2402 and 2301, 2402 and 2302, 2402 and 2303, 2402 and 2304, 2403 and 2294, 2403 and 2295, 2403 and 2296, 2403 and 2297, 2403 and 2298, 2403 and 2299, 2403 and 2300, 2403 and 2301, 2403 and 2302, 2403 and 2303, 2403 and 2304, 2404 and 2294, 2404 and 2295, 2404 and 2296, 2404 and 2297, 2404 and 2298, 2404 and 2299, 2404 and 2300, 2404 and 2301, 2404 and 2302, 2404 and 2303, 2404 and 2304, 2405 and 2294, 2405 and 2295, 2405 and 2296, 2405 and 2297, 2405 and 2298, 2405 and 2299, 2405 and 2300, 2405 and 2301, 2405 and 2302, 2405 and 2303, 2405 and 2304, 2406 and 2294, 2406 and 2295, 2406 and 2296, 2406 and 2297, 2406 and 2298, 2406 and 2299, 2406 and 2300, 2406 and 2301, 2406 and 2302, 2406 and 2303, 2406 and 2304, 2407 and 2294, 2407 and 2295, 2407 and 2296, 2407 and 2297, 2407 and 2298, 2407 and 2299, 2407 and 2300, 2407 and 2301, 2407 and 2302, 2407 and 2303, 2407 and 2304, 2408 and 2294, 2408 and 2295, 2408 and 2296, 2408 and 2297, 2408 and 2298, 2408 and 2299, 2408 and 2300, 2408 and 2301, 2408 and 2302, 2408 and 2303, 2408 and 2304, 2409 and 2294, 2409 and 2295, 2409 and 2296, 2409 and 2297, 2409 and 2298, 2409 and 2299, 2409 and 2300, 2409 and 2301, 2409 and 2302, 2409 and 2303, 2409 and 2304, 2410 and 2294, 2410 and 2295, 2410 and 2296, 2410 and 2297, 2410 and 2298, 2410 and 2299, 2410 and 2300, 2410 and 2301, 2410 and 2302, 2410 and 2303, 2410 and 2304, 2411 and 2294, 2411 and 2295, 2411 and 2296, 2411 and 2297, 2411 and 2298, 2411 and 2299, 2411 and 2300, 2411 and 2301, 2411 and 2302, 2411 and 2303, 2411 and 2304, 2412 and 2294, 2412 and 2295, 2412 and 2296, 2412 and 2297, 2412 and 2298, 2412 and 2299, 2412 and 2300, 2412 and 2301, 2412 and 2302, 2412 and 2303, 2412 and 2304, 2413 and 2294, 2413 and 2295, 2413 and 2296, 2413 and 2297, 2413 and 2298, 2413 and 2299, 2413 and 2300, 2413 and 2301, 2413 and 2302, 2413 and 2303, 2413 and 2304, 2414 and 2294, 2414 and 2295, 2414 and 2296, 2414 and 2297, 2414 and 2298, 2414 and 2299, 2414 and 2300, 2414 and 2301, 2414 and 2302, 2414 and 2303, 2414 and 2304, 2415 and 2294, 2415 and 2295, 2415 and 2296, 2415 and 2297, 2415 and 2298, 2415 and 2299, 2415 and 2300, 2415 and 2301, 2415 and 2302, 2415 and 2303, 2415 and 2304, 2416 and 2294, 2416 and 2295, 2416 and 2296, 2416 and 2297, 2416 and 2298, 2416 and 2299, 2416 and 2300, 2416 and 2301, 2416 and 2302, 2416 and 2303, 2416 and 2304, 2417 and 2294, 2417 and 2295, 2417 and 2296, 2417 and 2297, 2417 and 2298, 2417 and 2299, 2417 and 2300, 2417 and 2301, 2417 and 2302, 2417 and 2303, 2417 and 2304, 2418 and 2294, 2418 and 2295, 2418 and 2296, 2418 and 2297, 2418 and 2298, 2418 and 2299, 2418 and 2300, 2418 and 2301, 2418 and 2302, 2418 and 2303, 2418 and 2304, 2419 and 2294, 2419 and 2295, 2419 and 2296, 2419 and 2297, 2419 and 2298, 2419 and 2299, 2419 and 2300, 2419 and 2301, 2419 and 2302, 2419 and 2303, 2419 and 2304, 2420 and 2294, 2420 and 2295, 2420 and 2296, 2420 and 2297, 2420 and 2298, 2420 and 2299, 2420 and 2300, 2420 and 2301, 2420 and 2302, 2420 and 2303, 2420 and 2304, 2421 and 2294, 2421 and 2295, 2421 and 2296, 2421 and 2297, 2421 and 2298, 2421 and 2299, 2421 and 2300, 2421 and 2301, 2421 and 2302, 2421 and 2303, 2421 and 2304, 2422 and 2294, 2422 and 2295, 2422 and 2296, 2422 and 2297, 2422 and 2298, 2422 and 2299, 2422 and 2300, 2422 and 2301, 2422 and 2302, 2422 and 2303, or 2422 and 2304, The gRNA core of the PEgRNA can comprise SEQ ID NO. 5857-5859. Exemplary PEgRNAs provided in Table 15 can comprise SEQ ID NO. 2445, 2446, 2447, 2448, 2449, 2450, 2451, 2452, 2453, 2454, 2455, 2456, 2457, 2458, 2459, 2460, 2461, 2462, 2463, 2464, 2465, 2466, 2467, 2468, 2469, 2470, 2471, 2472, 2473, 2474, 2475, 2476, 2477, 2478, 2479, 2480, 2481, 2482, 2483, 2484, 2485, 2486, 2487, 2488, 2489, 2490, 2491, 2492, 2493, 2494, 2495, 2496, 2497, 2498, 2499, 2500, 2501, 2502, 2503, 2504, 2505, 2506, 2507, 2508, 2509, 2510, 2511, 2512, 2513, 2514, 2515, 2516, 2517, 2518, 2519, 2520, 2521, 2522, 2523, 2524, 2525, 2526, 2527, 2528, 2529, 2530, 2531, 2532, 2533, 2534, 2535, 2538, 2539, 2540, 2541, 2542, 2543, 2544, 2545, 2546, 2547, 2548, 2549, 2550, 2551, 2553, 2554, 2555, 2556, 2557, 2558, 2559, 2560, 2561, 2562, 2563, 2564, 2565, 2566, 2567, 2568, 2569, 2570, 2571, 2572, 2573, 2574, 2575, 2576, 2577, 2578, 2580, 2582, 2584, 2585, 2586, 2587, 2588, 2589, 2590, 2591, 2592, 2593, 2594, 2595, 2596, 2597, 2598, 2600, 2601, 2602, 2603, 2605, 2606, 2607, 2608, 2609, 2610, 2611, 2612, 2613, 2614, 2615, 2616, 2617, 2618, 2619, 2620, 2621, 2623, 2624, 2628, 2629, 2630, 2631, 2632, 2633, 2634, 2635, 2636, 2637, 2638, 2643, 2645, 2646, 2647, 2648, 2649, 2650, 2651, 2652, 2653, 2654, 2655, 2656, 2657, 2658, 2659, 2660, 2663, 2664, 2665, 2667, 2668, 2669, 2670, 2671, 2672, 2674, 2675, 2676, 2677, 2678, 2680, 2681, 2683, 2685, 2687, 2688, 2689, 2690, 2692, 2694, 2695, 2696, 2697, 2699, 2701, 2702, 2704, 2706, 2708, 2711, 2713, 2715, 2716, 2717, 2720, 2721, 2722, 2723, 2725, 2726, 2727, 2728, 2729, 2730, 2733, 2734, 2735, 2744, 2747, 2748, 2749, 2752, 2753, 2757, 2758, 2759, 2760, 2761, 2762, 2764, 2765, 2768, 2769, 2770, 2772, 2773, 2774, 2777, 2786, 2788, 2789, 2790, 2791, 2792, 2793, 2794, 2795, 2796, 2797, 2798, 2799, 2800, 2801, 2802, 2807, 2810, 2811, 2812, 2814, 2816, 2824, 2825, 2826, 2828, 2829, 2830, 2832, 2833, 2834, 2841, 2842, 2843, 2844, 2846, 2847, 2854, 2855, 2856, 2857, 2862, 2864, 2866, 2867, 2868, 2869, 2870, 2871, 2885, 2886, 2887, 2888, 2889, 2890, 2891, 2893, 2894, 2896, 2898, 2899, 2901, 2902, 2909, 2910, 2914, 2916, 2918, 2919, 2920, 2926, 2927, 2932, 2933, 2937, 2938, 2939, 2941, 2942, 2945, 2953, 2954, 2956, 2957, 2960, 2962, 2963, 2964, 2965, 2967, 2972, 2973, 2977, 2979, 2980, 2982, 2983, 2988, 2991, 2993, 2994, 2995, 2997, 3006, 3008, 3012, 3013, 3015, 3023, 3024, 3027, 3028, 3029, 3030, 3031, 3032, 3033, 3034, 3035, 3036, 3037, 3038, 3039, 3043, 3044, 3045, 3046, 3048, 3049, 3050, 3051, 3052, 3053, 3054, 3055, 3059, 3064, 3065, 3071, 3072, 3075, 3076, 3080, 3082, 3084, 3093, 3096, 3098, 3099, 3101, 3119, 3121, 3122, 3123, 3124, 3126, 3128, 3130, 3133, 3142, 3144, 3148, 3159, 3161, 3162, 3163, 3164, 3165, 3166, 3168, 3169, 3170, 3176, 3182, 3188, 3190, 3191, 3195, 3200, 3202, 3203, 3210, 3212, 3216, 3218, 3226, 3227, 3228, 3229, 3230, 3231, 3232, 3234, 3235, 3238, 3239, 3241, 3243, 3244, 3245, 3246, 3247, 3248, 3249, 3250, 3260, 3262, 3263, 3271, 3273, 3275, 3281, 3282, 3283, 3287, 3288, 3289, 3300, 3301, 3302, 3303, 3304, 3305, 3307, 3310, 3311, 3312, 3313, 3314, 3315, 3316, 3317, 3318, 3322, 3324, 3325, 3328, 3330, 3346, 3347, 3348, 3349, 3350, 3358, 3359, 3362, 3364, 3365, 3366, 3367, 3368, 3372, 3373, 3382, 3385, 3387, 3388, 3389, 3390, 3391, 3392, 3393, 3400, 3403, 3404, 3405, 3407, 3408, 3409, 3412, 3414, 3420, 3423, 3425, 3426, 3427, 3428, 3429, 3430, 3431, 3434, 3438, 3441, 3442, 3446, 3449, 3450, 3451, 3452, 3453, 3454, 3455, 3463, 3466, 3469, 3470, 3471, 3472, 3473, 3474, 3477, 3478, 3480, 3481, 3482, 3487, 3490, 3494, 3498, 3499, 3502, 3503, 3505, 3506, 3508, 3509, 3510, 3511, 3513, 3520, 3522, 3523, 3526, 3529, 3533, 3535, 3536, 3542, 3543, 3546, 3547, 3549, 3550, 3553, 3554, 3555, 3557, 3560, 3561, 3563, 3564, 3567, 3568, 3569, 3571, 3574, 3575, 576, 3578, 3579, 3580, 3581, 3583, 3584, 3585, 3592, 3594, 3595, 3596, 3597, 3603, 3612, 3613, 3617, 3622, 3625, 3626, 3627, 3628, 3630, 3631, 3632, 3633, 3635, 3636, 3638, 3639, 3640, 3641, 3642, 3646, 3647, 3648, 3654, 3657, 3659, 3660, 3661, 3664, 3668, 3669, 3673, 3674, 3678, 3679, 3680, 3681, 3684, 3685, 3687, 3688, 3697, 3699, 3702, 3703, 3704, 3705, 3706, 3708, 3710, 3711, 3712, 3714, 3715, 3721, 3722, 3724, 3725, 3728, 3729, 3730, 3731, 3732, 3733, 3734, 3735, 3736, 3737, 3739, 3740, 3741, 3743, 3744, 3746, 3748, 3755, 3761, 3770, 3771, 3773, 3774, 3776, 3778, 3779, 3781, 3782, 3784, 3785, 3792, 3793, 3794, 3795, 3796, 3797, 3798, 3799, 3800, 3801, 3802, 3803, 3804, 3805, 3806, 3807, 3808, 3809, 3810, 3811, 3812, 3814, 3815, 3816, 3820, 3829, 3839, 3841, 3842, 3843, 3844, 3845, 3851, 3852, 3853, 3854, 3855, 3856, 3857, 3858, 3859, 3860, 3861, 3862, 3863, 3864, 3865, 3868, 3869, 3871, 3874, 3875, 3876, 3877, 3878, 3879, 3880, 3882, 3883, 3884, 3885, 3887, 3895, 3899, 3904, 3907, 3908, 3909, 3910, 3911, 3912, 3913, 3914, 3915, 3916, 3917, 3921, 3924, 3927, 3928, 3929, 3931, 3932, 3935, 3936, 3937, 3938, 3939, 3940, 3941, 3942, 3943, 3945, 3946, 3956, 3957, 3961, 3962, 3965, 3971, 3977, 3978, 3979, 3980, 3981, 3982, 3983, 3985, 3988, 3989, 3990, 3991, 3992, 3993, 3994, 3995, 3997, 3998, 3999, 4001, 4002, 4003, 4004, 4009, 4011, 4012, 4013, 4015, 4016, 4017, 4020, 4021, 4023, 4025, 4026, 4028, 4029, 4031, 4032, 4034, 4035, 4036, 4037, 4038, 4040, 4052, 4055, 4056, 4060, 4061, 4066, 4067, 4070, 4077, 4078, 4080, 4081, 4082, 4083, 4084, 4085, 4086, 4087, 4088, 4089, 4090, 4102, 4105, 4106, 4108, 4109, 4110, 4114, 4115, 4117, 4118, 4119, 4128, 4129, 4132, 4136, 4137, 4142, 4147, 4159, 4163, 4168, 4170, 4171, 4172, 4173, 4175, 4182, 4183, 4186, 4188, 4192, 4194, 4199, 4208, 4225, 4226, 4227, 4228, 4232, 4239, 4240, or 4258. Such PEgRNA sequences may further comprise a 3′ motif at the 3′ end of the extension arm, for example, a hairpin-forming motif or a series of 3, 4 or more U nucleotides. Exemplary PEgRNA sequences with such 3′ adaptations include SEQ ID NOs: 2536, 2537, 2552, 2579, 2581, 2583, 2599, 2604, 2622, 2644, 2661, 2662, 2682, 2686, 2691, 2693, 2698, 2710, 2738, 2739, 2745, 2750, 2751, 2771, 2775, 2776, 2782, 2785, 2787, 2818, 2823, 2831, 2835, 2839, 2873, 2874, 2876, 2892, 2895, 2897, 2904, 2906, 2912, 2915, 2917, 2923, 2948, 2952, 2970, 2974, 2987, 2989, 3003, 3022, 3025, 3040, 3079, 3083, 3089, 3100, 3105, 3108, 3120, 3127, 3137, 3149, 3167, 3174, 3184, 3194, 3199, 3225, 3259, 3264, 3267, 3268, 3272, 3276, 3277, 3279, 3286, 3297, 3345, 3355, 3411, 3415, 3424, 3443, 3476, 3501, 3540, 3552, 3650, and 3653. Without being bound by theory, such 3′ motifs are believed to increase PEgRNA stability. Such PEgRNA sequences may alternatively or additionally be adapted for transcription from a DNA template, for example, by including a 5′ terminal G if the spacer of the PEgRNA begins with another nucleotide, by including 6 or 7 U nucleotides at the 3′ end of the extension arm, or both. Exemplary transcription-adapted sequences include SEQ ID NOs: 2625, 2626, 2627, 2639, 2640, 2641, 2642, 2666, 2673, 2679, 2684, 2700, 2703, 2705, 2707, 2709, 2712, 2714, 2718, 2719, 2724, 2731, 2732, 2736, 2737, 2740, 2741, 2742, 2743, 2746, 2754, 2755, 2756, 2763, 2766, 2767, 2778, 2779, 2780, 2781, 2783, 2784, 2803, 2804, 2805, 2806, 2808, 2809, 2813, 2815, 2817, 2819, 2820, 2821, 2822, 2827, 2836, 2837, 2838, 2840, 2845, 2848, 2849, 2850, 2851, 2852, 2853, 2858, 2859, 2860, 2861, 2863, 2865, 2872, 2875, 2877, 2878, 2879, 2880, 2881, 2882, 2883, 2884, 2900, 2903, 2905, 2907, 2908, 2911, 2913, 2921, 2922, 2924, 2925, 2928, 2929, 2930, 2931, 2934, 2935, 2936, 2940, 2943, 2944, 2946, 2947, 2949, 2950, 2951, 2955, 2958, 2959, 2961, 2966, 2968, 2969, 2971, 2975, 2976, 2978, 2981, 2984, 2985, 2986, 2990, 2992, 2996, 2998, 2999, 3000, 3001, 3002, 3004, 3005, 3007, 3009, 3010, 3011, 3014, 3016, 3017, 3018, 3019, 3020, 3021, 3026, 3041, 3042, 3047, 3056, 3057, 3058, 3060, 3061, 3062, 3063, 3066, 3067, 3068, 3069, 3070, 3073, 3074, 3077, 3078, 3081, 3085, 3086, 3087, 3088, 3090, 3091, 3092, 3094, 3095, 3097, 3102, 3103, 3104, 3106, 3107, 3109, 3110, 3111, 3112, 3113, 3114, 3115, 3116, 3117, 3118, 3125, 3129, 3131, 3132, 3134, 3135, 3136, 3138, 3139, 3140, 3141, 3143, 3145, 3146, 3147, 3150, 3151, 3152, 3153, 3154, 3155, 3156, 3157, 3158, 3160, 3171, 3172, 3173, 3175, 3177, 3178, 3179, 3180, 3181, 3183, 3185, 3186, 3187, 3189, 3192, 3193, 3196, 3197, 3198, 3201, 3204, 3205, 3206, 3207, 3208, 3209, 3211, 3213, 3214, 3215, 3217, 3219, 3220, 3221, 3222, 3223, 3224, 3233, 3236, 3237, 3240, 3242, 3251, 3252, 3253, 3254, 3255, 3256, 3257, 3258, 3261, 3265, 3266, 3269, 3270, 3274, 3278, 3280, 3284, 3285, 3290, 3291, 3292, 3293, 3294, 3295, 3296, 3298, 3299, 3306, 3308, 3309, 3319, 3320, 3321, 3323, 3326, 3327, 3329, 3331, 3332, 3333, 3334, 3335, 3336, 3337, 3338, 3339, 3340, 3341, 3342, 3343, 3344, 3351, 3352, 3353, 3354, 3356, 3357, 3360, 3361, 3363, 3369, 3370, 3371, 3374, 3375, 3376, 3377, 3378, 3379, 3380, 3381, 3383, 3384, 3386, 3394, 3395, 3396, 3397, 3398, 3399, 3401, 3402, 3406, 3410, 3413, 3416, 3417, 3418, 3419, 3421, 3422, 3432, 3433, 3435, 3436, 3437, 3439, 3440, 3444, 3445, 3447, 3448, 3456, 3457, 3458, 3459, 3460, 3461, 3462, 3464, 3465, 3467, 3468, 3475, 3479, 3483, 3484, 3485, 3486, 3488, 3489, 3491, 3492, 3493, 3495, 3496, 3497, 3500, 3504, 3507, 3512, 3514, 3515, 3516, 3517, 3518, 3519, 2521, 3524, 3525, 3527, 3528, 3530, 3531, 3532, 3534, 3537, 3538, 3539, 3541, 3544, 3545, 3548, 3551, 3556, 3558, 3559, 3562, 3565, 3566, 3570, 3572, 3573, 3577, 3582, 3586, 3587, 3588, 3589, 3590, 3591, 3593, 3598, 3599, 3600, 3601, 3602, 3604, 3605, 3606, 3607, 3608, 3609, 3610, 3611, 3614, 3615, 3616, 3618, 3619, 3620, 3621, 3623, 3624, 3629, 3634, 3637, 3643, 3644, 3645, 3649, 3651, 3652, 3655, 3656, 3658, 3662, 3663, 3665, 3666, 3667, 3670, 3671, 3672, 3675, 3676, 3677, 3682, 3683, 3686, 3689, 3690, 3691, 3692, 3693, 3694, 3695, 3696, 3698, 3700, 3701, 3707, 3709, 3713, 3716, 3717, 3718, 3719, 3720, 3723, 3726, 3727, 3738, 3742, 3745, 3747, 3749, 3750, 3751, 3752, 3753, 3754, 3756, 3757, 3758, 3759, 3760, 3762, 3763, 3764, 3765, 3766, 3767, 3768, 3769, 3772, 3775, 3777, 3780, 3783, 3786, 3787, 3788, 3789, 3790, 3791, 3813, 3817, 3818, 3819, 3821, 3822, 3823, 3824, 3825, 3826, 3827, 3828, 3830, 3831, 3832, 3833, 3834, 3835, 3836, 3837, 3838, 3840, 3846, 3847, 3848, 3849, 3850, 3866, 3867, 3870, 3872, 3873, 3881, 3886, 3888, 3889, 3890, 3891, 3892, 3893, 3894, 3896, 3897, 3898, 3900, 3901, 3902, 3903, 3905, 3906, 3918, 3919, 3920, 3922, 3923, 3925, 3926, 3930, 3933, 3934, 3944, 3947, 3948, 3949, 3950, 3951, 3952, 3953, 3954, 3955, 3958, 3959, 3960, 3963, 3964, 3966, 3967, 3968, 3969, 3970, 3972, 3973, 3974, 3975, 3976, 3984, 3986, 3987, 3996, 4000, 4005, 4006, 4007, 4008, 4010, 4014, 4018, 4019, 4022, 4024, 4027, 4030, 4033, 4039, 4041, 4042, 4043, 4044, 4045, 4046, 4047, 4048, 4049, 4050, 4051, 4053, 4054, 4057, 4058, 4059, 4062, 4063, 4064, 4065, 4068, 4069, 4071, 4072, 4073, 4074, 4075, 4076, 4079, 4091, 4092, 4093, 4094, 4095, 4096, 4097, 4098, 4099, 4100, 4101, 4103, 4104, 4107, 4111, 4112, 4113, 4116, 4120, 4121, 4122, 4123, 4124, 4125, 4126, 4127, 4130, 4131, 4133, 4134, 4135, 4138, 4139, 4140, 4141, 4143, 4144, 4145, 4146, 4148, 4149, 4150, 4151, 4152, 4153, 4154, 4155, 4156, 4157, 4158, 4160, 4161, 4162, 4164, 4165, 4166, 4167, 4169, 4174, 4176, 4177, 4178, 4179, 4180, 4181, 4184, 4185, 4187, 4189, 4190, 4191, 4193, 4195, 4196, 4197, 4198, 4200, 4201, 4202, 4203, 4204, 4205, 4206, 4207, 4209, 4210, 4211, 4212, 4213, 4214, 4215, 4216, 4217, 4218, 4219, 4220, 4221, 4222, 4223, 4224, 4229, 4230, 4231, 4233, 4234, 4235, 4236, 4237, 4238, 4241, 4242, 4243, 4244, 4245, 4246, 4247, 4248, 4249, 4250, 4251, 4252, 4253, 4254, 4255, 4256, 4257, 4259, 4260, 4261, 4262, 4263, 4264, 4265, 4266, 4267, 4268, 4269, 4270, 4271, 4272, 4273, 4274, 4275, 4276, 4277, 4278, 4279, 4280, 4281, 4282, 4283, 4284, 4285, 4286, 4287, 4288, 4289, 4290, 4291, 4292, 4293, 4294, 4295, 4296, 4297, 4298, 4299, 4300, 4301, 4302, 4303, 4304, 4305, 4306, 4307, 4308, 4309, 4310, 4311, 4312, 4313, 4314, 4315, 4316, 4317, 4318, 4319, 4320, 4321, 4322, 4323, 4324, 4325, 4326, 4327, 4328, 4329, 4330, 4331, 4332, 4333, 4334, 4335, 4336, 4337, 4338, 4339, 4340, 4341, 4342, 4343, 4344, 4345, 4346, 4347, 4348, 4349, 4350, 4351, 4352, 4353, 4354, 4355, 4356, 4357, 4358, 4359, 4360, 4361, 4362, 4363, 4364, 4365, 4366, 4367, 4368, 4369, 4370, 4371, 4372, 4373, 4374, 4375, 4376, 4377, 4378, 4379, 4380, 4381, 4382, 4383, 4384, 4385, 4386, 4387, 4388, 4389, 4390, 4391, 4392, 4393, 4394, 4395, 4396, 4397, 4398, 4399, 4400, 4401, 4402, 4403, 4404, 4405, 4406, 4407, 4408, and 4409. Such plasmid adapted sequences may further comprise a hairpin-forming motif between the PBS and the 3′ terminal U series.

[0285] Any of the PEgRNAs of Table 15 can be used in a Prime Editing system further comprising a nick guide RNA (ngRNA). Such ngRNA can comprise a spacer comprising nucleotides 5-20 of SEQ ID NO: 41, 60, 61, 62, 63, 64, 65, 66, 69, 71, 2045, 2046, 2047, 2048, 2049, 2050, 2051, 2052, 2053, 2054, 2055, 2056, 2057, 2058, 2059, 2060, 2061, 2062, 2063, 2064, 2065, 2066, 2067, 2068, 2069, 2070, 2071, 2072, 2073, 2074, 2075, 2076, 2077, 2078, 2079, 2080, 2081, 2082, 2083, 2084, 2085, 2086, 2087, 2088, 2089, 2090, 2091, 2092, 2093, 2094, 2095, 2096, 2423, 2424, 2425, 2426, 2427, 2428, 2429, 2430, 2431, 2432, 2433, 2434, 2435, 2436, 2437, 2438, 2439, 2440, 2441, 2442, 2443, or 2444 and a gRNA core capable of binding to a Cas9 protein. The spacer of the ngRNA can comprise nucleotides 4-20, 3-20, 2-20, or 1-20 of SEQ ID NO: 41, 60, 61, 62, 63, 64, 65, 66, 69, 71, 2045, 2046, 2047, 2048, 2049, 2050, 2051, 2052, 2053, 2054, 2055, 2056, 2057, 2058, 2059, 2060, 2061, 2062, 2063, 2064, 2065, 2066, 2067, 2068, 2069, 2070, 2071, 2072, 2073, 2074, 2075, 2076, 2077, 2078, 2079, 2080, 2081, 2082, 2083, 2084, 2085, 2086, 2087, 2088, 2089, 2090, 2091, 2092, 2093, 2094, 2095, 2096, 2423, 2424, 2425, 2426, 2427, 2428, 2429, 2430, 2431, 2432, 2433, 2434, 2435, 2436, 2437, 2438, 2439, 2440, 2441, 2442, 2443, or 2444. The spacer of the ngRNA can comprise SEQ ID NO: 41, 60, 61, 62, 63, 64, 65, 66, 69, 71, 2045, 2046, 2047, 2048, 2049, 2050, 2051, 2052, 2053, 2054, 2055, 2056, 2057, 2058, 2059, 2060, 2061, 2062, 2063, 2064, 2065, 2066, 2067, 2068, 2069, 2070, 2071, 2072, 2073, 2074, 2075, 2076, 2077, 2078, 2079, 2080, 2081, 2082, 2083, 2084, 2085, 2086, 2087, 2088, 2089, 2090, 2091, 2092, 2093, 2094, 2095, 2096, 2423, 2424, 2425, 2426, 2427, 2428, 2429, 2430, 2431, 2432, 2433, 2434, 2435, 2436, 2437, 2438, 2439, 2440, 2441, 2442, 2443, or 2444. The gRNA core of the ngRNA can comprise SEQ ID NO. 5857-5859. Exemplary ngRNA provided in Table 15 can comprise SEQ ID NO: 2257, 2258, 2259, 2260, 2261, 2262, 2263, 2264, 2265, 2266, 2267, 2268, 2269, 2270, 2271, 2272, 2273, 2274, 2275, 2276, 2277, 2278, 2279, 2280, 2281, 2282, 2283, 2284, 2285, 2286, 2287, 2288, 2289, 4410, 4411, 4412, 4413, 4414, 4415, 4416, 4417, 4418, 4419, 4420, 4421, or 4422. Such ngRNA sequences may further comprise a 3′ motif at the 3′ end of the gRNA core, for example, a series of 3, 4 or more U nucleotides. Exemplary ngRNA sequences with such 3′ adaptations include SEQ ID NOs: 2290, 2291, 2292, 4423, or 4424. Without being bound by theory, such 3′ motifs are believed to increase ngRNA stability.

[0286] Table 16 provides Prime Editing guide RNAs (PEgRNAs), which can be used in Prime Editing systems disclosed herein. Such Prime Editing systems can comprise a Cas9 protein capable of recognizing an NGG or NG PAM sequence (e.g., GGG or GG), and a reverse transcriptase. The Prime Editing systems (e.g., PE3 or PE3b systems) can further comprise a nick guide RNA (ngRNA). Such PEgRNAs and Prime Editing systems can be used, for example, to correct an H1069Q mutation in ATP7B.

[0287] The PEgRNAs of Table 16 comprise: (a) a spacer comprising nucleotides 5-20 of SEQ ID NO: 4425, (b) a gRNA core capable of binding to a Cas9 protein, and (c) an extension arm comprising: (i) an editing template comprising any one of SEQ ID NOs: 4437-4492, and (ii) a primer binding site (PBS) comprising any one of SEQ ID NOs: 2297, 4426, 4427, 4428, 4429, 4430, 4431, 4432, 4433, 4434, 4435, and 4436. The spacer of the PEgRNA can comprise, for example, nucleotides 4-20, 3-20, 2-20, or 1-20 of SEQ ID NO: 4425. The spacer of the PEgRNA can comprise SEQ ID NO: 4425. The RTT and the PBS can comprise respectively SEQ ID NOs: 4437 and 2297, 4437 and 4426, 4437 and 4427, 4437 and 4428, 4437 and 4429, 4437 and 4430, 4437 and 4431, 4437 and 4432, 4437 and 4433, 4437 and 4434, 4437 and 4435, 4437 and 4436, 4438 and 2297, 4438 and 4426, 4438 and 4427, 4438 and 4428, 4438 and 4429, 4438 and 4430, 4438 and 4431, 4438 and 4432, 4438 and 4433, 4438 and 4434, 4438 and 4435, 4438 and 4436, 4439 and 2297, 4439 and 4426, 4439 and 4427, 4439 and 4428, 4439 and 4429, 4439 and 4430, 4439 and 4431, 4439 and 4432, 4439 and 4433, 4439 and 4434, 4439 and 4435, 4439 and 4436, 4440 and 2297, 4440 and 4426, 4440 and 4427, 4440 and 4428, 4440 and 4429, 4440 and 4430, 4440 and 4431, 4440 and 4432, 4440 and 4433, 4440 and 4434, 4440 and 4435, 4440 and 4436, 4441 and 2297, 4441 and 4426, 4441 and 4427, 4441 and 4428, 4441 and 4429, 4441 and 4430, 4441 and 4431, 4441 and 4432, 4441 and 4433, 4441 and 4434, 4441 and 4435, 4441 and 4436, 4442 and 2297, 4442 and 4426, 4442 and 4427, 4442 and 4428, 4442 and 4429, 4442 and 4430, 4442 and 4431, 4442 and 4432, 4442 and 4433, 4442 and 4434, 4442 and 4435, 4442 and 4436, 4443 and 2297, 4443 and 4426, 4443 and 4427, 4443 and 4428, 4443 and 4429, 4443 and 4430, 4443 and 4431, 4443 and 4432, 4443 and 4433, 4443 and 4434, 4443 and 4435, 4443 and 4436, 4444 and 2297, 4444 and 4426, 4444 and 4427, 4444 and 4428, 4444 and 4429, 4444 and 4430, 4444 and 4431, 4444 and 4432, 4444 and 4433, 4444 and 4434, 4444 and 4435, 4444 and 4436, 4445 and 2297, 4445 and 4426, 4445 and 4427, 4445 and 4428, 4445 and 4429, 4445 and 4430, 4445 and 4431, 4445 and 4432, 4445 and 4433, 4445 and 4434, 4445 and 4435, 4445 and 4436, 4446 and 2297, 4446 and 4426, 4446 and 4427, 4446 and 4428, 4446 and 4429, 44, 46 and 4430, 4446 and 4431, 4446 and 4432, 4446 and 4433, 4446 and 4434, 4446 and 4435, 4446 and 4436, 4447 and 2297, 4447 and 4426, 4447 and 4427, 4447 and 4428, 4447 and 4429, 4447 and 4430, 4447 and 4431, 4447 and 4432, 4447 and 4433, 4447 and 4434, 4447 and 4435, 4447 and 4436, 4448 and 2297, 4448 and 4426, 4448 and 4427, 4448 and 4428, 4448 and 4429, 4448 and 4430, 4448 and 4431, 4448 and 4432, 4448 and 4433, 4448 and 4434, 4448 and 4435, 4448 and 4436, 4449 and 2297, 4449 and 4426, 4449 and 4427, 4449 and 4428, 4449 and 4429, 4449 and 4430, 4449 and 4431, 4449 and 4432, 4449 and 4433, 4449 and 4434, 4449 and 4435, 4449 and 4436, 4450 and 2297, 4450 and 4426, 4450 and 4427, 4450 and 4428, 4450 and 4429, 4450 and 4430, 4450 and 4431, 4450 and 4432, 4450 and 4433, 4450 and 4434, 4450 and 4435, 4450 and 4436, 4451 and 2297, 4451 and 4426, 4451 and 4427, 4451 and 4428, 4451 and 4429, 4451 and 4430, 4451 and 4431, 4451 and 4432, 4451 and 4433, 4451 and 4434, 4451 and 4435, 4451 and 4436, 4452 and 2297, 4452 and 4426, 4452 and 4427, 4452 and 4428, 4452 and 4429, 4452 and 4430, 4452 and 4431, 4452 and 4432, 4452 and 4433, 4452 and 4434, 4452 and 4435, 4452 and 4436, 4453 and 2297, 4453 and 4426, 4453 and 4427, 4453 and 4428, 4453 and 4429, 4453 and 4430, 4453 and 4431, 4453 and 4432, 4453 and 4433, 4453 and 4434, 4453 and 4435, 4453 and 4436, 4454 and 2297, 4454 and 4426, 4454 and 4427, 4454 and 4428, 4454 and 4429, 4454 and 4430, 4454 and 4431, 4454 and 4432, 4454 and 4433, 4454 and 4434, 4454 and 4435, 4454 and 4436, 4455 and 2297, 4455 and 4426, 4455 and 4427, 4455 and 4428, 4455 and 4429, 4455 and 4430, 4455 and 4431, 4455 and 4432, 4455 and 4433, 4455 and 4434, 4455 and 4435, 4455 and 4436, 4456 and 2297, 4456 and 4426, 4456 and 4427, 4456 and 4428, 4456 and 4429, 4456 and 4430, 4456 and 4431, 4456 and 4432, 4456 and 4433, 4456 and 4434, 4456 and 4435, 4456 and 4436, 4457 and 2297, 4457 and 4426, 4457 and 4427, 4457 and 4428, 4457 and 4429, 4457 and 4430, 4457 and 4431, 4457 and 4432, 4457 and 4433, 4457 and 4434, 4457 and 4435, 4457 and 4436, 4458 and 2297, 4458 and 4426, 4458 and 4427, 4458 and 4428, 4458 and 4429, 4458 and 4430, 4458 and 4431, 4458 and 4432, 4458 and 4433, 4458 and 4434, 4458 and 4435, 4458 and 4436, 4459 and 2297, 4459 and 4426, 4459 and 4427, 4459 and 4428, 4459 and 4429, 4459 and 4430, 4459 and 4431, 4459 and 4432, 4459 and 4433, 4459 and 4434, 4459 and 4435, 4459 and 4436, 4460 and 2297, 4460 and 4426, 4460 and 4427, 4460 and 4428, 4460 and 4429, 4460 and 4430, 4460 and 4431, 4460 and 4432, 4460 and 4433, 4460 and 4434, 4460 and 4435, 4460 and 4436, 4461 and 2297, 4461 and 4426, 4461 and 4427, 4461 and 4428, 4461 and 4429, 4461 and 4430, 4461 and 4431, 4461 and 4432, 4461 and 4433, 4461 and 4434, 4461 and 4435, 4461 and 4436, 4462 and 2297, 4462 and 4426, 4462 and 4427, 4462 and 4428, 4462 and 4429, 4462 and 4430, 4462 and 4431, 4462 and 4432, 4462 and 4433, 4462 and 4434, 4462 and 4435, 4462 and 4436, 4463 and 2297, 4463 and 4426, 4463 and 4427, 4463 and 4428, 4463 and 4429, 4463 and 4430, 4463 and 4431, 4463 and 4432, 4463 and 4433, 4463 and 4434, 4463 and 4435, 4463 and 4436, 4464 and 2297, 4464 and 4426, 4464 and 4427, 4464 and 4428, 4464 and 4429, 4464 and 4430, 4464 and 4431, 4464 and 4432, 4464 and 4433, 4464 and 4434, 4464 and 4435, 4464 and 4436, 4465 and 2297, 4465 and 4426, 4465 and 4427, 4465 and 4428, 4465 and 4429, 4465 and 4430, 4465 and 4431, 4465 and 4432, 4465 and 4433, 4465 and 4434, 4465 and 4435, 4465 and 4436, 4466 and 2297, 4466 and 4426, 4466 and 4427, 4466 and 4428, 4466 and 4429, 4466 and 4430, 4466 and 4431, 4466 and 4432, 4466 and 4433, 4466 and 4434, 4466 and 4435, 4466 and 4436, 4467 and 2297, 4467 and 4426, 4467 and 4427, 4467 and 4428, 4467 and 4429, 4467 and 4430, 4467 and 4431, 4467 and 4432, 4467 and 4433, 4467 and 4434, 4467 and 4435, 4467 and 4436, 4468 and 2297, 4468 and 4426, 4468 and 4427, 4468 and 4428, 4468 and 4429, 4468 and 4430, 4468 and 4431, 4468 and 4432, 4468 and 4433, 4468 and 4434, 4468 and 4435, 4468 and 4436, 4469 and 2297, 4469 and 4426, 4469 and 4427, 4469 and 4428, 4469 and 4429, 4469 and 4430, 4469 and 4431, 4469 and 4432, 4469 and 4433, 4469 and 4434, 4469 and 4435, 4469 and 4436, 4470 and 2297, 4470 and 4426, 4470 and 4427, 4470 and 4428, 4470 and 4429, 4470 and 4430, 4470 and 4431, 4470 and 4432, 4470 and 4433, 4470 and 4434, 4470 and 4435, 4470 and 4436, 4471 and 2297, 4471 and 4426, 4471 and 4427, 4471 and 4428, 4471 and 4429, 4471 and 4430, 4471 and 4431, 4471 and 4432, 4471 and 4433, 4471 and 4434, 4471 and 4435, 4471 and 4436, 4472 and 2297, 4472 and 4426, 4472 and 4427, 4472 and 4428, 4472 and 4429, 4472 and 4430, 4472 and 4431, 4472 and 4432, 4472 and 4433, 4472 and 4434, 4472 and 4435, 4472 and 4436, 4473 and 2297, 4473 and 4426, 4473 and 4427, 4473 and 4428, 4473 and 4429, 4473 and 4430, 4473 and 4431, 4473 and 4432, 4473 and 4433, 4473 and 4434, 4473 and 4435, 4473 and 4436, 4474 and 2297, 4474 and 4426, 4474 and 4427, 4474 and 4428, 4474 and 4429, 4474 and 4430, 4474 and 4431, 4474 and 4432, 4474 and 4433, 4474 and 4434, 4474 and 4435, 4474 and 4436, 4475 and 2297, 4475 and 4426, 4475 and 4427, 4475 and 4428, 4475 and 4429, 4475 and 4430, 4475 and 4431, 4475 and 4432, 4475 and 4433, 4475 and 4434, 4475 and 4435, 4475 and 4436, 4476 and 2297, 4476 and 4426, 4476 and 4427, 4476 and 4428, 4476 and 4429, 4476 and 4430, 4476 and 4431, 4476 and 4432, 4476 and 4433, 4476 and 4434, 4476 and 4435, 4476 and 4436, 4477 and 2297, 4477 and 4426, 4477 and 4427, 4477 and 4428, 4477 and 4429, 4477 and 4430, 4477 and 4431, 4477 and 4432, 4477 and 4433, 4477 and 4434, 4477 and 4435, 4477 and 4436, 4478 and 2297, 4478 and 4426, 4478 and 4427, 4478 and 4428, 4478 and 4429, 4478 and 4430, 4478 and 4431, 4478 and 4432, 4478 and 4433, 4478 and 4434, 4478 and 4435, 4478 and 4436, 4479 and 2297, 4479 and 4426, 4479 and 4427, 4479 and 4428, 4479 and 4429, 4479 and 4430, 4479 and 4431, 4479 and 4432, 4479 and 4433, 4479 and 4434, 4479 and 4435, 4479 and 4436, 4480 and 2297, 4480 and 4426, 4480 and 4427, 4480 and 4428, 4480 and 4429, 4480 and 4430, 4480 and 4431, 4480 and 4432, 4480 and 4433, 4480 and 4434, 4480 and 4435, 4480 and 4436, 4481 and 2297, 4481 and 4426, 4481 and 4427, 4481 and 4428, 4481 and 4429, 4481 and 4430, 4481 and 4431, 4481 and 4432, 4481 and 4433, 4481 and 4434, 4481 and 4435, 4481 and 4436, 4482 and 2297, 4482 and 4426, 4482 and 4427, 4482 and 4428, 4482 and 4429, 4482 and 4430, 4482 and 4431, 4482 and 4432, 4482 and 4433, 4482 and 4434, 4482 and 4435, 4482 and 4436, 4483 and 2297, 4483 and 4426, 4483 and 4427, 4483 and 4428, 4483 and 4429, 4483 and 4430, 4483 and 4431, 4483 and 4432, 4483 and 4433, 4483 and 4434, 4483 and 4435, 4483 and 4436, 4484 and 2297, 4484 and 4426, 4484 and 4427, 4484 and 4428, 4484 and 4429, 4484 and 4430, 4484 and 4431, 4484 and 4432, 4484 and 4433, 4484 and 4434, 4484 and 4435, 4484 and 4436, 44185 and 2297, 4485 and 4426, 4485 and 4427, 4485 and 4428, 4485 and 4429, 4485 and 4430, 4485 and 4431, 4485 and 4432, 4485 and 4433, 4485 and 4434, 4485 and 4435, 4485 and 4436, 4486 and 2297, 4486 and 4426, 4486 and 4427, 4486 and 4428, 4486 and 4429, 4486 and 4430, 4486 and 4431, 4486 and 4432, 4486 and 4433, 4486 and 4434, 4486 and 4435, 4486 and 4436, 4487 and 2297, 4487 and 4426, 4487 and 4427, 4487 and 4428, 4487 and 4429, 4487 and 4430, 4487 and 4431, 4487 and 4432, 4487 and 4433, 4487 and 4434, 4487 and 4435, 4487 and 4436, 4488 and 2297, 4488 and 4426, 4488 and 4427, 4488 and 4428, 4488 and 4429, 4488 and 4430, 4488 and 4431, 4488 and 4432, 4488 and 4433, 4488 and 4434, 4488 and 4435, 4488 and 4436, 4489 and 2297, 4489 and 4426, 4489 and 4427, 4489 and 4428, 4489 and 4429, 4489 and 4430, 4489 and 4431, 4489 and 4432, 4489 and 4433, 4489 and 4434, 4489 and 4435, 4489 and 4436, 4490 and 2297, 4490 and 4426, 4490 and 4427, 4490 and 4428, 4490 and 4429, 4490 and 4430, 4490 and 4431, 4490 and 4432, 4490 and 4433, 4490 and 4434, 4490 and 4435, 4490 and 4436, 4491 and 2297, 4491 and 4426, 4491 and 4427, 4491 and 4428, 4491 and 4429, 4491 and 4430, 4491 and 4431, 4491 and 4432, 4491 and 4433, 4491 and 4434, 4491 and 4435, 4491 and 4436, 4492 and 2297, 4492 and 4426, 4492 and 4427, 4492 and 4428, 4492 and 4429, 4492 and 4430, 4492 and 4431, 4492 and 4432, 4492 and 4433, 4492 and 4434, 4492 and 4435, or 4492 and 4436. The gRNA core of the PEgRNA can comprise SEQ ID NO. 5857-5859. Exemplary PEgRNAs provided in Table 16 can comprise SEQ ID NO. 4493, 4494, 4495, 4496, 4497, 4498, 4499, 4500, 4501, 4502, 4503, 4504, 4505, 4506, 4507, 4518, 4509, 4510, 4511, 4512, 4513, 4514, 4515, 4516, 4517, 4518, 4519, 4521, 4522, 4523, 4524, 4525, 4526, 4527, 4528, 4529, 4530, 4531, 4532, 4533, 4535, 4537, 4538, 4539, 4540, 4542, 4543, 4544, 4545, 4546, 4547, 4549, 4550, 4552, 4553, 4555, 4556, 4557, 4558, 4559, 4560, 4561, 4562, 4564, 4566, 4567, 4568, 4570, 4573, 4574, 4575, 4576, 4577, 4578, 4579, 4580, 4581, 4582, 4583, 4584, 4585, 4586, 4587, 4588, 4589, 4591, 4592, 4595, 4596, 4597, 4603, 4604, 4605, 4606, 4612, 4614, 4617, 4618, 4619, 4620, 4621, 4623, 4624, 4625, 4626, 4627, 4629, 4630, 4632, 4634, 4635, 4637, 4638, 4639, 4640, 4646, 4649, 4651, 4653, 4654, 4655, 4656, 4657, 4659, 4660, 4661, 4662, 4666, 4667, 4668, 4670, 4673, 4674, 4675, 4676, 4677, 4679, 4682, 4684, 4689, 4691, 4697, 4698, 4700, 4702, 4705, 4710, 4711, 4714, 4717, 4718, 4719, 4720, 4722, 4724, 4725, 4726, 4737, 4738, 4739, 4740, 4742, 4746, 4748, 4749, 4751, 4755, 4756, 4758, 4759, 4760, 4761, 4763, 4765, 4767, 4768, 4776, 4780, 4784, 4785, 4789, 4792, 4795, 4799, 4801, 4802, 4804, 4809, 4811, 4812, 4816, 4817, 4820, 4822, 4826, 4827, 4828, 4832, 4835, 4836, 4839, 4840, 4841, 4842, 4848, 4852, 4856, 4857, 4859, 4860, 4861, 4862, 4864, 4865, 4868, 4871, 4873, 4874, 4875, 4876, 4882, 4887, 4889, 4893, 4895, 4896, 4898, 4902, 4904, 4905, 4907, 4908, 4909, 4912, 4913, 4915, 4922, 4923, 4924, 4932, 4934, 4935, 4936, 4937, 4939, 4947, 4949, 4950, 4951, 4954, 4955, 4956, 4957, 4958, 4959, 4961, 4963, 4969, 4970, 4971, 4972, 4976, 4978, 4979, 4980, 4985, 4986, 4987, 4990, 4993, 4995, 4998, 5000, 5001, 5002, 5003, 5004, 5005, 5010, 5011, 5018, 5019, 5020, 5021, 5022, 5023, 5024, 5026, 5029, 5030, 5033, 5034, 5035, 5036, 5037, 5039, 5042, 5043, 5044, 5045, 5046, 5047, 5053, 5054, 5056, 5057, 5058, 5060, 5062, 5063, 5066, 5070, 5071, 5072, 5073, 5076, 5077, 5084, 5088, 5091, 5092, 5093, 5094, 5096, 5097, 5098, 5103, 5110, 5111, 5112, 5115, 5119, 5123, 5132, 5135, 5138, 5147, 5151, 5164, 5167, 5175, 5176, 5180, 5181, 5183, 5184, 5185, 5186, 5187, 5188, 5189, 5190, 5191, 5192, 5193, 5194, 5195, 5196, 5197, 5198, 5199, 5200, 5201, 5202, 5203, 5204, or 5205. Such PEgRNA sequences may further comprise a 3′ motif at the 3′ end of the extension arm, for example, a hairpin-forming motif or a series of 3, 4 or more U nucleotides. Exemplary PEgRNA sequences with such 3′ adaptations include SEQ ID NOs: 4520, 4534, 4536, 4541, 4548, 4551, 4554, 4563, 4565, 4571, 4572, 4590, 4593, 4594, 4601, 4602, 4608, 4609, 4610, 4611, 4613, 4622, 4631, 4636, 4641, 4643, 4644, 4647, 4648, 4672, 4680, 4681, 4685, 4686, 4687, 4688, 4693, 4695, 4696, 4703, 4706, 4708, 4709, 4712, 4721, 4723, 4728, 4730, 4733, 4735, 4736, 4741, 4743, 4744, 4747, 4753, 4762, 4769, 4770, 4772, 4778, 4779, 4781, 4782, 4788, 4791, 4793, 4797, 4803, 4805, 4807, 4808, 4818, 4819, 4821, 4823, 4824, 4825, 4829, 4847, 4851, 4854, 4866, 4867, 4872, 4879, 4880, 4885, 4891, 4892, 4900, 4910, 4911, 4919, 4926, 4928, 4946, 4967, and 4983. Without being bound by theory, such 3′ motifs are believed to increase PEgRNA stability. Such PEgRNA sequences may alternatively or additionally be adapted for transcription from a DNA template, for example, by including a 5′ terminal G if the spacer of the PEgRNA begins with another nucleotide, by including 6 or 7 U nucleotides at the 3′ end of the extension arm, or both. Exemplary transcription-adapted sequences include SEQ ID NOs: 4569, 4598, 4599, 4600, 4607, 4615, 4616, 4628, 4633, 4642, 4645, 4650, 4652, 4658, 4663, 4664, 4665, 4669, 4671, 4678, 4683, 4690, 4692, 4694, 4699, 4701, 4704, 4707, 4713, 4715, 4716, 4727, 4729, 4731, 4732, 4734, 4745, 4750, 4752, 4754, 4757, 4764, 4766, 4771, 4773, 4774, 4775, 4777, 4783, 4786, 4787, 4790, 4794, 4796, 4798, 4800, 4806, 4810, 4813, 4814, 4815, 4830, 4831, 4833, 4834, 4837, 4838, 4843, 4844, 4845, 4846, 4849, 4850, 4853, 4855, 4858, 4863, 4869, 4870, 4877, 4878, 4881, 4883, 4884, 4886, 4888, 4890, 4894, 4897, 4899, 4901, 49031, 4906, 4914, 4916, 4917, 4918, 4920, 4921, 4925, 4927, 4929, 4930, 4931, 4933, 4938, 4940, 4941, 4942, 4943, 4944, 4945, 4948, 4952, 4953, 4960, 4962, 4964, 4965, 4966, 4968, 4973, 4974, 4975, 4977, 4981, 4982, 4984, 4988, 4989, 4991, 4992, 4994, 4996, 4997, 4999, 5006, 5007, 5008, 5009, 5012, 5013, 5014, 5015, 5016, 5017, 5025, 5027, 5028, 5031, 5032, 5038, 5040, 5041, 5048, 5049, 5050, 5051, 5052, 5055, 5059, 5061, 5064, 5065, 5067, 5068, 5069, 5074, 5075, 5078, 5079, 5080, 5081, 5082, 5083, 5085, 5086, 5087, 5089, 5090, 5095, 5099, 5100, 5101, 5102, 5104, 5105, 5106, 5107, 5108, 5109, 5113, 5114, 5116, 5117, 5118, 5120, 5121, 5122, 5124, 5125, 5126, 5127, 5128, 5129, 5130, 5131, 5133, 5134, 5136, 5137, 5139, 5140, 5141, 5142, 5143, 5144, 5145, 5146, 5148, 5149, 5150, 5152, 5153, 5154, 5155, 5156, 5157, 5158, 5159, 5160, 5161, 5162, 5163, 5165, 5166, 5168, 5169, 5170, 5171, 5172, 5173, 5174, 5177, 5178, 5179, and 5182. Such plasmid adapted sequences may further comprise a hairpin-forming motif between the PBS and the 3′ terminal U series.

[0288] Any of the PEgRNAs of Table 16 can be used in a Prime Editing system further comprising a nick guide RNA (ngRNA). Such ngRNA can comprise a spacer comprising nucleotides 5-20 of SEQ ID NO: 41, 60, 61, 62, 63, 64, 65, 66, 69, 71, 2045, 2046, 2047, 2048, 2049, 2050, 2051, 2052, 2053, 2054, 2055, 2056, 2057, 2058, 2059, 2060, 2061, 2062, 2063, 2064, 2065, 2066, 2067, 2068, 2069, 2070, 2071, 2072, 2073, 2074, 2075, 2076, 2077, 2078, 2079, 2080, 2081, 2082, 2083, 2084, 2085, 2086, 2087, 2088, 2089, 2090, 2091, 2092, 2093, 2094, 2095, 2096, 2437, 2439, 2442, 2443, or 2444 and a gRNA core capable of binding to a Cas9 protein. The spacer of the ngRNA can comprise nucleotides 4-20, 3-20, 2-20, or 1-20 of SEQ ID NO: 41, 60, 61, 62, 63, 64, 65, 66, 69, 71, 2045, 2046, 2047, 2048, 2049, 2050, 2051, 2052, 2053, 2054, 2055, 2056, 2057, 2058, 2059, 2060, 2061, 2062, 2063, 2064, 2065, 2066, 2067, 2068, 2069, 2070, 2071, 2072, 2073, 2074, 2075, 2076, 2077, 2078, 2079, 2080, 2081, 2082, 2083, 2084, 2085, 2086, 2087, 2088, 2089, 2090, 2091, 2092, 2093, 2094, 2095, 2096, 2437, 2439, 2442, 2443, or 2444. The spacer of the ngRNA can comprise SEQ ID NO: 41, 60, 61, 62, 63, 64, 65, 66, 69, 71, 2045, 2046, 2047, 2048, 2049, 2050, 2051, 2052, 2053, 2054, 2055, 2056, 2057, 2058, 2059, 2060, 2061, 2062, 2063, 2064, 2065, 2066, 2067, 2068, 2069, 2070, 2071, 2072, 2073, 2074, 2075, 2076, 2077, 2078, 2079, 2080, 2081, 2082, 2083, 2084, 2085, 2086, 2087, 2088, 2089, 2090, 2091, 2092, 2093, 2094, 2095, 2096, 2437, 2439, 2442, 2443, or 2444. The gRNA core of the ngRNA can comprise SEQ ID NO. 5857-5859. Exemplary ngRNA provided in Table 16 can comprise SEQ ID NO: 2257, 2258, 2259, 2260, 2261, 2262, 2263, 2264, 2265, 2266, 2267, 2268, 2269, 2270, 2271, 2272, 2273, 2274, 2275, 2276, 2277, 2278, 2279, 2280, 2281, 2282, 2283, 2284, 2285, 2286, 2287, 2288, 2289, 4411, 4416, 4418, 4420, or 4422. Such ngRNA sequences may further comprise a 3′ motif at the 3′ end of the gRNA core, for example, a series of 3, 4 or more U nucleotides. Exemplary ngRNA sequences with such 3′ adaptations include SEQ ID NOs: 2290-2292. Without being bound by theory, such 3′ motifs are believed to increase ngRNA stability.

[0289] Table 17 provides Prime Editing guide RNAs (PEgRNAs), which can be used in Prime Editing systems disclosed herein. Such Prime Editing systems can comprise a Cas9 protein capable of recognizing an NGA, NGN, NRN, or NG PAM sequence (e.g., GGA or GG), and a reverse transcriptase. The Prime Editing systems (e.g., PE3 or PE3b systems) can further comprise a nick guide RNA (ngRNA). Such PEgRNAs and Prime Editing systems can be used, for example, to correct an H1069Q mutation in ATP7B.

[0290] The PEgRNAs of Table 17 comprise: (a) a spacer comprising nucleotides 5-20 of SEQ ID NO: 5206, (b) a gRNA core capable of binding to a Cas9 protein, and (c) an extension arm comprising: (i) an editing template comprising SEQ ID NO: 5218, and (ii) a primer binding site (PBS) comprising any one of SEQ ID NOs: 5207-5217. The spacer of the PEgRNA can comprise, for example, nucleotides 4-20, 3-20, 2-20, or 1-20 of SEQ ID NO: 5206. The spacer of the PEgRNA can comprise SEQ ID NO: 5206. The RTT and the PBS can comprise respectively SEQ ID NOs: 5218 and 5207, 5218 and 5208, 5218 and 5209, 5218 and 5210, 5218 and 5211, 5218 and 5212, 5218 and 5213, 5218 and 5214, 5218 and 5215, 5218 and 5216, or 5218 and 5217. The gRNA core of the PEgRNA can comprise SEQ ID NO. 5857-5859. Exemplary PEgRNAs provided in Table 17 may further comprise a 3′ motif at the 3′ end of the extension arm, for example, a hairpin-forming motif or a series of 3, 4 or more U nucleotides. Without being bound by theory, such 3′ motifs are believed to increase PEgRNA stability. Such PEgRNA sequences may alternatively or additionally be adapted for transcription from a DNA template, for example, by including a 5′ terminal G if the spacer of the PEgRNA begins with another nucleotide, by including 6 or 7 U nucleotides at the 3′ end of the extension arm, or both. Such plasmid adapted sequences may further comprise a hairpin-forming motif between the PBS and the 3′ terminal U series.

[0291] Any of the PEgRNAs of Table 17 can be used in a Prime Editing system further comprising a nick guide RNA (ngRNA). Such ngRNA can comprise a spacer comprising nucleotides 5-20 of SEQ ID NO: 18, 19, 20, 21, 22, 23, 24, 25, 26, 27, 28, 29, 30, 31, 32, 33, 34, 35, 36, 37, 38, 39, 40, 42, 43, 44, 45, 46, 47, 48, 49, 50, 51, 52, 53, 54, 55, 56, 57, 58, 59, 67, 68, 70, 72, 199, 200, 203, 529, 737, 5219, 5220, 5221, 5222, 5223, 5224, 5225, 5226, or 5227 and a gRNA core capable of binding to a Cas9 protein. The spacer of the ngRNA can comprise nucleotides 4-20, 3-20, 2-20, or 1-20 of SEQ ID NO: 18, 19, 20, 21, 22, 23, 24, 25, 26, 27, 28, 29, 30, 31, 32, 33, 34, 35, 36, 37, 38, 39, 40, 42, 43, 44, 45, 46, 47, 48, 49, 50, 51, 52, 53, 54, 55, 56, 57, 58, 59, 67, 68, 70, 72, 199, 200, 203, 529, 737, 5219, 5220, 5221, 5222, 5223, 5224, 5225, 5226, or 5227. The spacer of the ngRNA can comprise SEQ ID NO: 18, 19, 20, 21, 22, 23, 24, 25, 26, 27, 28, 29, 30, 31, 32, 33, 34, 35, 36, 37, 38, 39, 40, 42, 43, 44, 45, 46, 47, 48, 49, 50, 51, 52, 53, 54, 55, 56, 57, 58, 59, 67, 68, 70, 72, 199, 200, 203, 529, 737, 5219, 5220, 5221, 5222, 5223, 5224, 5225, 5226, or 5227. The gRNA core of the ngRNA can comprise SEQ ID NO. 5857-5859. Exemplary ngRNA provided in Table 17 can comprise SEQ ID NOs: 153, 154, 155, 156, 157, 158, 159, 160, 161, 162, 163, 164, 165, 166, 167, 168, 169, 170, 171, 172, 173, 174, 175, 176, 177, 178, 179, 180, 181, 290, 291, 292, 293, 681, 1501, or 1504. Such ngRNA sequences may further comprise a 3′ motif at the 3′ end of the gRNA core, for example, a series of 3, 4 or more U nucleotides. Without being bound by theory, such 3′ motifs are believed to increase ngRNA stability.

[0292] Table 18 provides Prime Editing guide RNAs (PEgRNAs), which can be used in Prime Editing systems disclosed herein. Such Prime Editing systems can comprise a Cas9 protein capable of recognizing an NGA or NG PAM sequence (e.g., GGA or GG), and a reverse transcriptase. The Prime Editing systems (e.g., PE3 or PE3b systems) can further comprise a nick guide RNA (ngRNA). Such PEgRNAs and Prime Editing systems can be used, for example, to correct an H1069Q mutation in ATP7B.

[0293] The PEgRNAs of Table 18 comprise: (a) a spacer comprising nucleotides 5-20 of SEQ ID NO: 5228, (b) a gRNA core capable of binding to a Cas9 protein, and (c) an extension arm comprising: (i) an editing template comprising any one of SEQ ID NOs: 5240-5247, and (ii) a primer binding site (PBS) comprising any one of SEQ ID NOs: 5229-5239. The spacer of the PEgRNA can comprise, for example, nucleotides 4-20, 3-20, 2-20, or 1-20 of SEQ ID NO: 5228. The spacer of the PEgRNA can comprise SEQ ID NO: 5228. The RTT and the PBS can comprise respectively SEQ ID NOs: 5240 and 5229, 5240 and 5230, 5240 and 5231, 5240 and 5232, 5240 and 5233, 5240 and 5234, 5240 and 5235, 5240 and 5236, 5240 and 5237, 5240 and 5238, 5240 and 5239, 5241 and 5229, 5241 and 5230, 5241 and 5231, 5241 and 5232, 5241 and 5233, 5241 and 5234, 5241 and 5235, 5241 and 5236, 5241 and 5237, 5241 and 5238, 5241 and 5239, 5242 and 5229, 5242 and 5230, 5242 and 5231, 5242 and 5232, 5242 and 5233, 5242 and 5234, 5242 and 5235, 5242 and 5236, 5242 and 5237, 5242 and 5238, 5242 and 5239, 5243 and 5229, 5243 and 5230, 5243 and 5231, 5243 and 5232, 5243 and 5233, 5243 and 5234, 5243 and 5235, 5243 and 5236, 5243 and 5237, 5243 and 5238, 5243 and 5239, 5244 and 5229, 5244 and 5230, 5244 and 5231, 5244 and 5232, 5244 and 5233, 5244 and 5234, 5244 and 5235, 5244 and 5236, 5244 and 5237, 5244 and 5238, 5244 and 5239, 5245 and 5229, 5245 and 5230, 5245 and 5231, 5245 and 5232, 5245 and 5233, 5245 and 5234, 5245 and 5235, 5245 and 5236, 5245 and 5237, 5245 and 5238, 5245 and 5239, 5246 and 5229, 5246 and 5230, 5246 and 5231, 5246 and 5232, 5246 and 5233, 5246 and 5234, 5246 and 5235, 5246 and 5236, 5246 and 5237, 5246 and 5238, 5246 and 5239, 5247 and 5229, 5247 and 5230, 5247 and 5231, 5247 and 5232, 5247 and 5233, 5247 and 5234, 5247 and 5235, 5247 and 5236, 5247 and 5237, 5247 and 5238, or 5247 and 5239. The gRNA core of the PEgRNA can comprise SEQ ID NO. 5857-5859. Such PEgRNA sequences may further comprise a 3′ motif at the 3′ end of the extension arm, for example, a hairpin-forming motif or a series of 3, 4 or more U nucleotides. Without being bound by theory, such 3′ motifs are believed to increase PEgRNA stability. Such PEgRNA sequences may alternatively or additionally be adapted for transcription from a DNA template, for example, by including a 5′ terminal G if the spacer of the PEgRNA begins with another nucleotide, by including 6 or 7 U nucleotides at the 3′ end of the extension arm, or both. Such plasmid adapted sequences may further comprise a hairpin-forming motif between the PBS and the 3′ terminal U series.

[0294] Any of the PEgRNAs of Table 18 can be used in a Prime Editing system further comprising a nick guide RNA (ngRNA). Such ngRNA can comprise a spacer comprising nucleotides 5-20 of SEQ ID NOs: 18, 19, 20, 21, 22, 23, 24, 25, 26, 27, 28, 29, 30, 31, 32, 33, 34, 35, 36, 37, 38, 39, 40, 42, 43, 44, 45, 46, 47, 48, 49, 50, 51, 52, 53, 54, 55, 56, 57, 58, 59, 67, 68, 70, 72, 199, 200, 203, 529, 736, 737, 738, 739, 740, 5219, 5220, 5221, 5222, 5223, 5224, 5225, 5226, or 5227 and a gRNA core capable of binding to a Cas9 protein. The spacer of the ngRNA can comprise nucleotides 4-20, 3-20, 2-20, or 1-20 of SEQ ID NO: 18, 19, 20, 21, 22, 23, 24, 25, 26, 27, 28, 29, 30, 31, 32, 33, 34, 35, 36, 37, 38, 39, 40, 42, 43, 44, 45, 46, 47, 48, 49, 50, 51, 52, 53, 54, 55, 56, 57, 58, 59, 67, 68, 70, 72, 199, 200, 203, 529, 736, 737, 738, 739, 740, 5219, 5220, 5221, 5222, 5223, 5224, 5225, 5226, or 5227. The spacer of the ngRNA can comprise SEQ ID NO: 18, 19, 20, 21, 22, 23, 24, 25, 26, 27, 28, 29, 30, 31, 32, 33, 34, 35, 36, 37, 38, 39, 40, 42, 43, 44, 45, 46, 47, 48, 49, 50, 51, 52, 53, 54, 55, 56, 57, 58, 59, 67, 68, 70, 72, 199, 200, 203, 529, 736, 737, 738, 739, 740, 5219, 5220, 5221, 5222, 5223, 5224, 5225, 5226, or 5227. The gRNA core of the ngRNA can comprise SEQ ID NO. 5857-5859. Exemplary ngRNA provided in Table 18 can comprise SEQ ID NO: 153, 154, 155, 156, 157, 158, 159, 160, 161, 162, 163, 164, 165, 166, 167, 168, 169, 170, 171, 172, 173, 174, 175, 176, 177, 178, 179, 180, 181, 290, 291, 292, 293, 681, 1501, 1502, 1503, or 1504. Such ngRNA sequences may further comprise a 3′ motif at the 3′ end of the gRNA core, for example, a series of 3, 4 or more U nucleotides. Without being bound by theory, such 3′ motifs are believed to increase ngRNA stability.

[0295] Table 19 provides Prime Editing guide RNAs (PEgRNAs), which can be used in Prime Editing systems disclosed herein. Such Prime Editing systems can comprise a Cas9 protein capable of recognizing an NGA or NG PAM sequence (e.g., TGA or TG), and a reverse transcriptase. The Prime Editing systems (e.g., PE3 or PE3b systems) can further comprise a nick guide RNA (ngRNA). Such PEgRNAs and Prime Editing systems can be used, for example, to correct an H1069Q mutation in ATP7B.

[0296] The PEgRNAs of Table 19 comprise: (a) a spacer comprising nucleotides 5-20 of SEQ ID NO: 5248, (b) a gRNA core capable of binding to a Cas9 protein, and (c) an extension arm comprising: (i) an editing template comprising any one of SEQ ID NOs: 5260-5279, and (ii) a primer binding site (PBS) comprising any one of SEQ ID NOs: 5249-5259. The spacer of the PEgRNA can comprise, for example, nucleotides 4-20, 3-20, 2-20, or 1-20 of SEQ ID NO: 5248. The spacer of the PEgRNA can comprise SEQ ID NO: 5248. The RTT and the PBS can comprise respectively SEQ ID NOs: 5260 and 5249, 5260 and 5250, 5260 and 5251, 5260 and 5252, 5260 and 5253, 5260 and 5254, 5260 and 5255, 5260 and 5256, 5260 and 5257, 5260 and 5258, 5260 and 5259, 5261 and 5249, 5261 and 5250, 5261 and 5251, 5261 and 5252, 5261 and 5253, 5261 and 5254, 5261 and 5255, 5261 and 5256, 5261 and 5257, 5261 and 5258, 5261 and 5259, 5262 and 5249, 5262 and 5250, 5262 and 5251, 5262 and 5252, 5262 and 5253, 5262 and 5254, 5262 and 5255, 5262 and 5256, 5262 and 5257, 5262 and 5258, 5262 and 5259, 5263 and 5249, 5263 and 5250, 5263 and 5251, 5263 and 5252, 5263 and 5253, 5263 and 5254, 5263 and 5255, 5263 and 5256, 5263 and 5257, 5263 and 5258, 5263 and 5259, 5264 and 5249, 5264 and 5250, 5264 and 5251, 5264 and 5252, 5264 and 5253, 5264 and 5254, 5264 and 5255, 5264 and 5256, 5264 and 5257, 5264 and 5258, 5264 and 5259, 5265 and 5249, 5265 and 5250, 5265 and 5251, 5265 and 5252, 5265 and 5253, 5265 and 5254, 5265 and 5255, 5265 and 5256, 5265 and 5257, 5265 and 5258, 5265 and 5259, 5266 and 5249, 5266 and 5250, 5266 and 5251, 5266 and 5252, 5266 and 5253, 5266 and 5254, 5266 and 5255, 5266 and 5256, 5266 and 5257, 5266 and 5258, 5266 and 5259, 5267 and 5249, 5267 and 5250, 5267 and 5251, 5267 and 5252, 5267 and 5253, 5267 and 5254, 5267 and 5255, 5267 and 5256, 5267 and 5257, 5267 and 5258, 5267 and 5259, 5268 and 5249, 5268 and 5250, 5268 and 5251, 5268 and 5252, 5268 and 5253, 5268 and 5254, 5268 and 5255, 5268 and 5256, 5268 and 5257, 5268 and 5258, 5268 and 5259, 5269 and 5249, 5269 and 5250, 5269 and 5251, 5269 and 5252, 5269 and 5253, 5269 and 5254, 5269 and 5255, 5269 and 5256, 5269 and 5257, 5269 and 5258, 5269 and 5259, 5270 and 5249, 5270 and 5250, 5270 and 5251, 5270 and 5252, 5270 and 5253, 5270 and 5254, 5270 and 5255, 5270 and 5256, 5270 and 5257, 5270 and 5258, 5270 and 5259, 5271 and 5249, 5271 and 5250, 5271 and 5251, 5271 and 5252, 5271 and 5253, 5271 and 5254, 5271 and 5255, 5271 and 5256, 5271 and 5257, 5271 and 5258, 5271 and 5259, 5272 and 5249, 5272 and 5250, 5272 and 5251, 5272 and 5252, 5272 and 5253, 5272 and 5254, 5272 and 5255, 5272 and 5256, 5272 and 5257, 5272 and 5258, 5272 and 5259, 5273 and 5249, 5273 and 5250, 5273 and 5251, 5273 and 5252, 5273 and 5253, 5273 and 5254, 5273 and 5255, 5273 and 5256, 5273 and 5257, 5273 and 5258, 5273 and 5259, 5274 and 5249, 5274 and 5250, 5274 and 5251, 5274 and 5252, 5274 and 5253, 5274 and 5254, 5274 and 5255, 5274 and 5256, 5274 and 5257, 5274 and 5258, 5274 and 5259, 5275 and 5249, 5275 and 5250, 5275 and 5251, 5275 and 5252, 5275 and 5253, 5275 and 5254, 5275 and 5255, 5275 and 5256, 5275 and 5257, 5275 and 5258, 5275 and 5259, 5276 and 5249, 5276 and 5250, 5276 and 5251, 5276 and 5252, 5276 and 5253, 5276 and 5254, 5276 and 5255, 5276 and 5256, 5276 and 5257, 5276 and 5258, 5276 and 5259, 5277 and 5249, 5277 and 5250, 5277 and 5251, 5277 and 5252, 5277 and 5253, 5277 and 5254, 5277 and 5255, 5277 and 5256, 5277 and 5257, 5277 and 5258, 5277 and 5259, 5278 and 5249, 5278 and 5250, 5278 and 5251, 5278 and 5252, 5278 and 5253, 5278 and 5254, 5278 and 5255, 5278 and 5256, 5278 and 5257, 5278 and 5258, 5278 and 5259, 5279 and 5249, 5279 and 5250, 5279 and 5251, 5279 and 5252, 5279 and 5253, 5279 and 5254, 5279 and 5255, 5279 and 5256, 5279 and 5257, 5279 and 5258, or 5279 and 5259. The gRNA core of the PEgRNA can comprise SEQ ID NO. 5857-5859. Such PEgRNA sequences may further comprise a 3′ motif at the 3′ end of the extension arm, for example, a hairpin-forming motif or a series of 3, 4 or more U nucleotides. Without being bound by theory, such 3′ motifs are believed to increase PEgRNA stability. Such PEgRNA sequences may alternatively or additionally be adapted for transcription from a DNA template, for example, by including a 5′ terminal G if the spacer of the PEgRNA begins with another nucleotide, by including 6 or 7 U nucleotides at the 3′ end of the extension arm, or both. Such plasmid adapted sequences may further comprise a hairpin-forming motif between the PBS and the 3′ terminal U series.

[0297] Any of the PEgRNAs of Table 19 can be used in a Prime Editing system further comprising a nick guide RNA (ngRNA). Such ngRNA can comprise a spacer comprising nucleotides 5-20 of SEQ ID NO: 18, 19, 20, 21, 22, 23, 24, 25, 26, 27, 28, 29, 30, 31, 32, 33, 34, 35, 36, 37, 38, 39, 40, 42, 43, 44, 45, 46, 47, 48, 49, 50, 51, 52, 53, 54, 55, 56, 57, 58, 59, 67, 68, 70, 72, 199, 200, 203, 529, 736, 737, 738, 739, 740, 5219, 5220, 5221, 5222, 5223, 5224, 5225, 5226, 5227, 5280, or 5281 and a gRNA core capable of binding to a Cas9 protein. The spacer of the ngRNA can comprise nucleotides 4-20, 3-20, 2-20, or 1-20 of SEQ ID NO: 18, 19, 20, 21, 22, 23, 24, 25, 26, 27, 28, 29, 30, 31, 32, 33, 34, 35, 36, 37, 38, 39, 40, 42, 43, 44, 45, 46, 47, 48, 49, 50, 51, 52, 53, 54, 55, 56, 57, 58, 59, 67, 68, 70, 72, 199, 200, 203, 529, 736, 737, 738, 739, 740, 5219, 5220, 5221, 5222, 5223, 5224, 5225, 5226, 5227, 5280 or 5281. The spacer of the ngRNA can comprise SEQ ID NO: 18, 19, 20, 21, 22, 23, 24, 25, 26, 27, 28, 29, 30, 31, 32, 33, 34, 35, 36, 37, 38, 39, 40, 42, 43, 44, 45, 46, 47, 48, 49, 50, 51, 52, 53, 54, 55, 56, 57, 58, 59, 67, 68, 70, 72, 199, 200, 203, 529, 736, 737, 738, 739, 740, 5219, 5220, 5221, 5222, 5223, 5224, 5225, 5226, 5227, 5280, or 5281. The gRNA core of the ngRNA can comprise SEQ ID NO. 5857-5859. Exemplary ngRNA provided in Table 19 can comprise SEQ ID NOs: 153, 154, 155, 156, 157, 158, 159, 160, 161, 162, 163, 164, 165, 166, 167, 168, 169, 170, 171, 172, 173, 174, 175, 176, 177, 178, 179, 180, 181, 290, 291, 292, 293, 681, 1501, 1502, 1503, or 1504. Such ngRNA sequences may further comprise a 3′ motif at the 3′ end of the gRNA core, for example, a series of 3, 4 or more U nucleotides. Without being bound by theory, such 3′ motifs are believed to increase ngRNA stability.

[0298] Table 20 provides Prime Editing guide RNAs (PEgRNAs), which can be used in Prime Editing systems disclosed herein. Such Prime Editing systems can comprise a Cas9 protein capable of recogiizing an NRN or NNGG PAM sequence (e.g., GAG or GAGG), and a reverse transcriptase. The Prime Editing systems (e.g., PE3 or PE3b systems) can further comprise a nick guide RNA (ngRNA). Such PEgRNAs and Prime Editing systems can be used, for example, to correct an H1069Q mutation in ATP7B.

[0299] The PEgRNAs of Table 20 comprise: (a) a spacer comprising nucleotides 5-20 of SEQ ID NO: 5282, (b) a gRNA core capable of binding to a Cas9 protein, and (c) an extension arm comprising: (i) an editing template comprising any one of SEQ ID NOs: 5294-5302, and (ii) a primer binding site (PBS) comprising any one of SEQ ID NOs: 5283-5293. The spacer of the PEgRNA can comprise, for example, nucleotides 4-20, 3-20, 2-20, or 1-20 of SEQ ID NO: 5282. The spacer of the PEgRNA can comprise SEQ ID NO: 5282. The RTT and the PBS can comprise respectively SEQ ID NOs: 5294 and 5283, 5294 and 5284, 5294 and 5285, 5294 and 5286, 5294 and 5287, 5294 and 5288, 5294 and 5289, 5294 and 5290, 5294 and 5291, 5294 and 5292, 5294 and 5293, 5295 and 5283, 5295 and 5284, 5295 and 5285, 5295 and 5286, 5295 and 5287, 5295 and 5288, 5295 and 5289, 5295 and 5290, 5295 and 5291, 5295 and 5292, 5295 and 5293, 5296 and 5283, 5296 and 5284, 5296 and 5285, 5296 and 5286, 5296 and 5287, 5296 and 5288, 5296 and 5289, 5296 and 5290, 5296 and 5291, 5296 and 5292, 5296 and 5293, 5297 and 5283, 5297 and 5284, 5297 and 5285, 5297 and 5286, 5297 and 5287, 5297 and 5288, 5297 and 5289, 5297 and 5290, 5297 and 5291, 5297 and 5292, 5297 and 5293, 5298 and 5283, 5298 and 5284, 5298 and 5285, 5298 and 5286, 5298 and 5287, 5298 and 5288, 5298 and 5289, 5298 and 5290, 5298 and 5291, 5298 and 5292, 5298 and 5293, 5299 and 5283, 5299 and 5284, 5299 and 5285, 5299 and 5286, 5299 and 5287, 5299 and 5288, 5299 and 5289, 5299 and 5290, 5299 and 5291, 5299 and 5292, 5299 and 5293, 5300 and 5283, 5300 and 5284, 5300 and 5285, 5300 and 5286, 5300 and 5287, 5300 and 5288, 5300 and 5289, 5300 and 5290, 5300 and 5291, 5300 and 5292, 5300 and 5293, 5301 and 5283, 5301 and 5284, 5301 and 5285, 5301 and 5286, 5301 and 5287, 5301 and 5288, 5301 and 5289, 5301 and 5290, 5301 and 5291, 5301 and 5292, 5301 and 5293, 5302 and 5283, 5302 and 5284, 5302 and 5285, 5302 and 5286, 5302 and 5287, 5302 and 5288, 5302 and 5289, 5302 and 5290, 5302 and 5291, 5302 and 5292, or 5302 and 5293. The gRNA core of the PEgRNA can comprise SEQ ID NO. 5857-5859. Such PEgRNA sequences may further comprise a 3′ motif at the 3′ end of the extension arm, for example, a hairpin-forming motif or a series of 3, 4 or more U nucleotides. Without being bound by theory, such 3′ motifs are believed to increase PEgRNA stability. Such PEgRNA sequences may alternatively or additionally be adapted for transcription from a DNA template, for example, by including a 5′ terminal G if the spacer of the PEgRNA begins with another nucleotide, by including 6 or 7 U nucleotides at the 3′ end of the extension arm, or both. Such plasmid adapted sequences may further comprise a hairpin-forming motif between the PBS and the 3′ terminal U series.

[0300] Any of the PEgRNAs of Table 20 can be used in a Prime Editing system further comprising a nick guide RNA (ngRNA). Such ngRNA can comprise a spacer comprising nucleotides 5-20 of SEQ ID NO: 27, 30, 33, 35, 50, 68, 70, 200, 201, 202, 204, 205, 206, 207, 208, 209, 337, 736, 740, 5303, 5304, 5305, 5306, 5307, 5308, 5309, 5310, 5311, or 5312 and a gRNA core capable of binding to a Cas9 protein. The spacer of the ngRNA can comprise nucleotides 4-20, 3-20, 2-20, or 1-20 of SEQ ID NO: 27, 30, 33, 35, 50, 68, 70, 200, 201, 202, 204, 205, 206, 207, 208, 209, 337, 736, 740, 5303, 5304, 5305, 5306, 5307, 5308, 5309, 5310, 5311, or 5312. The spacer of the ngRNA can comprise SEQ ID NO: 27, 30, 33, 35, 50, 68, 70, 200, 201, 202, 204, 205, 206, 207, 208, 209, 337, 736, 740, 5303, 5304, 5305, 5306, 5307, 5308, 5309, 5310, 5311, or 5312. The gRNA core of the ngRNA can comprise SEQ ID NO. 5857-5859. Exemplary ngRNA provided in Table 20 can comprise SEQ ID NOs: 153, 154, 155, 157, 160, 162, 163, 165, 166, 167, 170, 171, 172, 173, 177, 178, 180, 181, 291, 292, 1501, 1503, or 1504. Such ngRNA sequences may further comprise a 3′ motif at the 3′ end of the gRNA core, for example, a series of 3, 4 or more U nucleotides. Without being bound by theory, such 3′ motifs are believed to increase ngRNA stability.

[0301] Table 21 provides Prime Editing guide RNAs (PEgRNAs), which can be used in Prime Editing systems disclosed herein. Such Prime Editing systems can comprise a Cas9 protein capable of recognizing an NRN PAM sequence (e.g., CAG), and a reverse transcriptase. The Prime Editing systems (e.g., PE3 or PE3b systems) can further comprise a nick guide RNA (ngRNA). Such PEgRNAs and Prime Editing systems can be used, for example, to correct an H1069Q mutation in ATP7B.

[0302] The PEgRNAs of Table 21 comprise: (a) a spacer comprising nucleotides 5-20 of SEQ ID NO: 5313, (b) a gRNA core capable of binding to a Cas9 protein, and (c) an extension arm comprising: (i) an editing template comprising any one of SEQ ID NOs: 5325-5338, and (ii) a primer binding site (PBS) comprising any one of SEQ ID NOs: 5314-5324. The spacer of the PEgRNA can comprise, for example, nucleotides 4-20, 3-20, 2-20, or 1-20 of SEQ ID NO: 5313. The spacer of the PEgRNA can comprise SEQ ID NO: 5313. The RTT and the PBS can comprise respectively SEQ ID NOs: 5325 and 5314, 5325 and 5315, 5325 and 5316, 5325 and 5317, 5325 and 5318, 5325 and 5319, 5325 and 5320, 5325 and 5321, 5325 and 5322, 5325 and 5323, 5325 and 5324, 5326 and 5314, 5326 and 5315, 5326 and 5316, 5326 and 5317, 5326 and 5318, 5326 and 5319, 5326 and 5320, 5326 and 5321, 5326 and 5322, 5326 and 5323, 5326 and 5324, 5327 and 5314, 5327 and 5315, 5327 and 5316, 5327 and 5317, 5327 and 5318, 5327 and 5319, 5327 and 5320, 5327 and 5321, 5327 and 5322, 5327 and 5323, 5327 and 5324, 5328 and 5314, 5328 and 5315, 5328 and 5316, 5328 and 5317, 5328 and 5318, 5328 and 5319, 5328 and 5320, 5328 and 5321, 5328 and 5322, 5328 and 5323, 5328 and 5324, 5329 and 5314, 5329 and 5315, 5329 and 5316, 5329 and 5317, 5329 and 5318, 5329 and 5319, 5329 and 5320, 5329 and 5321, 5329 and 5322, 5329 and 5323, 5329 and 5324, 5330 and 5314, 5330 and 5315, 5330 and 5316, 5330 and 5317, 5330 and 5318, 5330 and 5319, 5330 and 5320, 5330 and 5321, 5330 and 5322, 5330 and 5323, 5330 and 5324, 5331 and 5314, 5331 and 5315, 5331 and 5316, 5331 and 5317, 5331 and 5318, 5331 and 5319, 5331 and 5320, 5331 and 5321, 5331 and 5322, 5331 and 5323, 5331 and 5324, 5332 and 5314, 5332 and 5315, 5332 and 5316, 5332 and 5317, 5332 and 5318, 5332 and 5319, 5332 and 5320, 5332 and 5321, 5332 and 5322, 5332 and 5323, 5332 and 5324, 5333 and 5314, 5333 and 5315, 5333 and 5316, 5333 and 5317, 5333 and 5318, 5333 and 5319, 5333 and 5320, 5333 and 5321, 5333 and 5322, 5333 and 5323, 5333 and 5324, 5334 and 5314, 5334 and 5315, 5334 and 5316, 5334 and 5317, 5334 and 5318, 5334 and 5319, 5334 and 5320, 5334 and 5321, 5334 and 5322, 5334 and 5323, 5334 and 5324, 5335 and 5314, 5335 and 5315, 5335 and 5316, 5335 and 5317, 5335 and 5318, 5335 and 5319, 5335 and 5320, 5335 and 5321, 5335 and 5322, 5335 and 5323, 5335 and 5324, 5336 and 5314, 5336 and 5315, 5336 and 5316, 5336 and 5317, 5336 and 5318, 5336 and 5319, 5336 and 5320, 5336 and 5321, 5336 and 5322, 5336 and 5323, 5336 and 5324, 5337 and 5314, 5337 and 5315, 5337 and 5316, 5337 and 5317, 5337 and 5318, 5337 and 5319, 5337 and 5320, 5337 and 5321, 5337 and 5322, 5337 and 5323, 5337 and 5324, 5338 and 5314, 5338 and 5315, 5338 and 5316, 5338 and 5317, 5338 and 5318, 5338 and 5319, 5338 and 5320, 5338 and 5321, 5338 and 5322, 5338 and 5323, or 5338 and 5324. The gRNA core of the PEgRNA can comprise SEQ ID NO. 5857-5859. Such PEgRNA sequences may further comprise a 3′ motif at the 3′ end of the extension arm, for example, a hairpin-forming motif or a series of 3, 4 or more U nucleotides. Without being bound by theory, such 3′ motifs are believed to increase PEgRNA stability. Such PEgRNA sequences may alternatively or additionally be adapted for transcription from a DNA template, for example, by including a 5′ terminal G if the spacer of the PEgRNA begins with another nucleotide, by including 6 or 7 U nucleotides at the 3′ end of the extension arm, or both. Such plasmid adapted sequences may further comprise a hairpin-forming motif between the PBS and the 3′ terminal U series.

[0303] Any of the PEgRNAs of Table 21 can be used in a Prime Editing system further comprising a nick guide RNA (ngRNA). Such ngRNA can comprise a spacer comprising nucleotides 5-20 of SEQ ID NO: 201, 206, 207, 208, 337, 5303, 5305, 5307, 5308, 5309, 5310, 5311, 5312, or 5339 and a gRNA core capable of binding to a Cas9 protein. The spacer of the ngRNA can comprise nucleotides 4-20, 3-20, 2-20, or 1-20 of SEQ ID NO: 201, 206, 207, 208, 337, 5303, 5305, 5307, 5308, 5309, 5310, 5311, 5312, or 5339. The spacer of the ngRNA can comprise SEQ ID NO: 201, 206, 207, 208, 337, 5303, 5305, 5307, 5308, 5309, 5310, 5311, 5312, or 5339. The gRNA core of the ngRNA can comprise SEQ ID NO. 5857-5859. Exemplary ngRNA provided in Table 21 can comprise SEQ ID NO: 155, 160, 165, 166, 171, 172, 177, 291, or 292. Such ngRNA sequences may further comprise a 3′ motif at the 3′ end of the gRNA core, for example, a series of 3, 4 or more U nucleotides. Without being bound by theory, such 3′ motifs are believed to increase ngRNA stability.

[0304] Table 22 provides Prime Editing guide RNAs (PEgRNAs), which can be used in Prime Editing systems disclosed herein. Such Prime Editing systems can comprise a Cas9 protein capable of recognizing an NRN PAM sequence (e.g., CAG), and a reverse transcriptase. The Prime Editing systems (e.g., PE3 or PE3b systems) can further comprise a nick guide RNA (ngRNA). Such PEgRNAs and Prime Editing systems can be used, for example, to correct an H1069Q mutation in ATP7B.

[0305] The PEgRNAs of Table 22 comprise: (a) a spacer comprising nucleotides 5-20 of SEQ ID NO: 5340, (b) a gRNA core capable of binding to a Cas9 protein, and (c) an extension arm comprising: (i) an editing template comprising any one of SEQ ID NOs: 5352-5368, and (ii) a primer binding site (PBS) comprising any one of SEQ ID NOs: 5341-5351. The spacer of the PEgRNA can comprise, for example, nucleotides 4-20, 3-20, 2-20, or 1-20 of SEQ ID NO: 5340. The spacer of the PEgRNA can comprise SEQ ID NO: 5340. The RTT and the PBS can comprise respectively SEQ ID NOs: 5352 and 5341, 5352 and 5342, 5352 and 5343, 5352 and 5344, 5352 and 5345, 5352 and 5346, 5352 and 5347, 5352 and 5348, 5352 and 5349, 5352 and 5350, 5352 and 5351, 5353 and 5341, 5353 and 5342, 5353 and 5343, 5353 and 5344, 5353 and 5345, 5353 and 5346, 5353 and 5347, 5353 and 5348, 5353 and 5349, 5353 and 5350, 5353 and 5351, 5354 and 5341, 5354 and 5342, 5354 and 5343, 5354 and 5344, 5354 and 5345, 5354 and 5346, 5354 and 5347, 5354 and 5348, 5354 and 5349, 5354 and 5350, 5354 and 5351, 5355 and 5341, 5355 and 5342, 5355 and 5343, 5355 and 5344, 5355 and 5345, 5355 and 5346, 5355 and 5347, 5355 and 5348, 5355 and 5349, 5355 and 5350, 5355 and 5351, 5356 and 5341, 5356 and 5342, 5356 and 5343, 5356 and 5344, 5356 and 5345, 5356 and 5346, 5356 and 5347, 5356 and 5348, 5356 and 5349, 5356 and 5350, 5356 and 5351, 5357 and 5341, 5357 and 5342, 5357 and 5343, 5357 and 5344, 5357 and 5345, 5357 and 5346, 5357 and 5347, 5357 and 5348, 5357 and 5349, 5357 and 5350, 5357 and 5351, 5358 and 5341, 5358 and 5342, 5358 and 5343, 5358 and 5344, 5358 and 5345, 5358 and 5346, 5358 and 5347, 5358 and 5348, 5358 and 5349, 5358 and 5350, 5358 and 5351, 5359 and 5341, 5359 and 5342, 5359 and 5343, 5359 and 5344, 5359 and 5345, 5359 and 5346, 5359 and 5347, 5359 and 5348, 5359 and 5349, 5359 and 5350, 5359 and 5351, 5360 and 5341, 5360 and 5342, 5360 and 5343, 5360 and 5344, 5360 and 5345, 5360 and 5346, 5360 and 5347, 5360 and 5348, 5360 and 5349, 5360 and 5350, 5360 and 5351, 5361 and 5341, 5361 and 5342, 5361 and 5343, 5361 and 5344, 5361 and 5345, 5361 and 5346, 5361 and 5347, 5361 and 5348, 5361 and 5349, 5361 and 5350, 5361 and 5351, 5362 and 5341, 5362 and 5342, 5362 and 5343, 5362 and 5344, 5362 and 5345, 5362 and 5346, 5362 and 5347, 5362 and 5348, 5362 and 5349, 5362 and 5350, 5362 and 5351, 5363 and 5341, 5363 and 5342, 5363 and 5343, 5363 and 5344, 5363 and 5345, 5363 and 5346, 5363 and 5347, 5363 and 5348, 5363 and 5349, 5363 and 5350, 5363 and 5351, 5364 and 5341, 5364 and 5342, 5364 and 5343, 5364 and 5344, 5364 and 5345, 5364 and 5346, 5364 and 5347, 5364 and 5348, 5364 and 5349, 5364 and 5350, 5364 and 5351, 5365 and 5341, 5365 and 5342, 5365 and 5343, 5365 and 5344, 5365 and 5345, 5365 and 5346, 5365 and 5347, 5365 and 5348, 5365 and 5349, 5365 and 5350, 5365 and 5351, 5366 and 5341, 5366 and 5342, 5366 and 5343, 5366 and 5344, 5366 and 5345, 5366 and 5346, 5366 and 5347, 5366 and 5348, 5366 and 5349, 5366 and 5350, 5366 and 5351, 5367 and 5341, 5367 and 5342, 5367 and 5343, 5367 and 5344, 5367 and 5345, 5367 and 5346, 5367 and 5347, 5367 and 5348, 5367 and 5349, 5367 and 5350, 5367 and 5351, 5368 and 5341, 5368 and 5342, 5368 and 5343, 5368 and 5344, 5368 and 5345, 5368 and 5346, 5368 and 5347, 5368 and 5348, 5368 and 5349, 5368 and 5350, or 5368 and 5351. The gRNA core of the PEgRNA can comprise SEQ ID NO. 5857-5859. Such PEgRNA sequences may further comprise a 3′ motif at the 3′ end of the extension arm, for example, a hairpin-forming motif or a series of 3, 4 or more U nucleotides. Without being bound by theory, such 3′ motifs are believed to increase PEgRNA stability. Such PEgRNA sequences may alternatively or additionally be adapted for transcription from a DNA template, for example, by including a 5′ terminal G if the spacer of the PEgRNA begins with another nucleotide, by including 6 or 7 U nucleotides at the 3′ end of the extension arm, or both. Such plasmid adapted sequences may further comprise a hairpin-forming motif between the PBS and the 3′ terminal U series.

[0306] Any of the PEgRNAs of Table 22 can be used in a Prime Editing system further comprising a nick guide RNA (ngRNA). Such ngRNA can comprise a spacer comprising nucleotides 5-20 of SEQ ID NO: 201, 206, 207, 208, 337, 5303, 5305, 5307, 5308, 5309, 5310, 5311, 5312, or 5339 and a gRNA core capable of binding to a Cas9 protein. The spacer of the ngRNA can comprise nucleotides 4-20, 3-20, 2-20, or 1-20 of SEQ ID NO: 201, 206, 207, 208, 337, 5303, 5305, 5307, 5308, 5309, 5310, 5311, 5312, or 5339. The spacer of the ngRNA can comprise SEQ ID NO: 201, 206, 207, 208, 337, 5303, 5305, 5307, 5308, 5309, 5310, 5311, 5312, or 5339. The gRNA core of the ngRNA can comprise SEQ ID NO. 5857-5859. Exemplary ngRNA provided in Table 22 can comprise SEQ ID NO: 155, 160, 165, 166, 171, 172, 177, 291, or 292. Such ngRNA sequences may further comprise a 3′ motif at the 3′ end of the gRNA core, for example, a series of 3, 4 or more U nucleotides. Without being bound by theory, such 3′ motifs are believed to increase ngRNA stability.

[0307] Table 23 provides Prime Editing guide RNAs (PEgRNAs), which can be used in Prime Editing systems disclosed herein. Such Prime Editing systems can comprise a Cas9 protein capable of recognizing an NRN or NNGG PAM sequence (e.g., AAG or AAGG), and a reverse transcriptase. The Prime Editing systems (e.g., PE3 or PE3b systems) can further comprise a nick guide RNA (ngRNA). Such PEgRNAs and Prime Editing systems can be used, for example, to correct an H1069Q mutation in ATP7B.

[0308] The PEgRNAs of Table 23 comprise: (a) a spacer comprising nucleotides 5-20 of SEQ ID NO: 5369, (b) a gRNA core capable of binding to a Cas9 protein, and (c) an extension arm comprising: (i) an editing template comprising any one of SEQ ID NOs: 5381-5401, and (ii) a primer binding site (PBS) comprising any one of SEQ ID NOs: 5370-5380. The spacer of the PEgRNA can comprise, for example, nucleotides 4-20, 3-20, 2-20, or 1-20 of SEQ ID NO: 5369. The spacer of the PEgRNA can comprise SEQ ID NO: 5369. The RTT and the PBS can comprise respectively SEQ ID NOs: 5381 and 5370, 5381 and 5371, 5381 and 5372, 5381 and 5373, 5381 and 5374, 5381 and 5375, 5381 and 5376, 5381 and 5377, 5381 and 5378, 5381 and 5379, 5381 and 5380, 5382 and 5370, 5382 and 5371, 5382 and 5372, 5382 and 5373, 5382 and 5374, 5382 and 5375, 5382 and 5376, 5382 and 5377, 5382 and 5378, 5382 and 5379, 5382 and 5380, 5383 and 5370, 5383 and 5371, 5383 and 5372, 5383 and 5373, 5383 and 5374, 5383 and 5375, 5383 and 5376, 5383 and 5377, 5383 and 5378, 5383 and 5379, 5383 and 5380, 5384 and 5370, 5384 and 5371, 5384 and 5372, 5384 and 5373, 5384 and 5374, 5384 and 5375, 5384 and 5376, 5384 and 5377, 5384 and 5378, 5384 and 5379, 5384 and 5380, 5385 and 5370, 5385 and 5371, 5385 and 5372, 5385 and 5373, 5385 and 5374, 5385 and 5375, 5385 and 5376, 5385 and 5377, 5385 and 5378, 5385 and 5379, 5385 and 5380, 5386 and 5370, 5386 and 5371, 5386 and 5372, 5386 and 5373, 5386 and 5374, 5386 and 5375, 5386 and 5376, 5386 and 5377, 5386 and 5378, 5386 and 5379, 5386 and 5380, 5387 and 5370, 5387 and 5371, 5387 and 5372, 5387 and 5373, 5387 and 5374, 5387 and 5375, 5387 and 5376, 5387 and 5377, 5387 and 5378, 5387 and 5379, 5387 and 5380, 5388 and 5370, 5388 and 5371, 5388 and 5372, 5388 and 5373, 5388 and 5374, 5388 and 5375, 5388 and 5376, 5388 and 5377, 5388 and 5378, 5388 and 5379, 5388 and 5380, 5389 and 5370, 5389 and 5371, 5389 and 5372, 5389 and 5373, 5389 and 5374, 5389 and 5375, 5389 and 5376, 5389 and 5377, 5389 and 5378, 5389 and 5379, 5389 and 5380, 5390 and 5370, 5390 and 5371, 5390 and 5372, 5390 and 5373, 5390 and 5374, 5390 and 5375, 5390 and 5376, 5390 and 5377, 5390 and 5378, 5390 and 5379, 5390 and 5380, 5391 and 5370, 5391 and 5371, 5391 and 5372, 5391 and 5373, 5391 and 5374, 5391 and 5375, 5391 and 5376, 5391 and 5377, 5391 and 5378, 5391 and 5379, 5391 and 5380, 5392 and 5370, 5392 and 5371, 5392 and 5372, 5392 and 5373, 5392 and 5374, 5392 and 5375, 5392 and 5376, 5392 and 5377, 5392 and 5378, 5392 and 5379, 5392 and 5380, 5393 and 5370, 5393 and 5371, 5393 and 5372, 5393 and 5373, 5393 and 5374, 5393 and 5375, 5393 and 5376, 5393 and 5377, 5393 and 5378, 5393 and 5379, 5393 and 5380, 5394 and 5370, 5394 and 5371, 5394 and 5372, 5394 and 5373, 5394 and 5374, 5394 and 5375, 5394 and 5376, 5394 and 5377, 5394 and 5378, 5394 and 5379, 5394 and 5380, 5395 and 5370, 5395 and 5371, 5395 and 5372, 5395 and 5373, 5395 and 5374, 5395 and 5375, 5395 and 5376, 5395 and 5377, 5395 and 5378, 5395 and 5379, 5395 and 5380, 5396 and 5370, 5396 and 5371, 5396 and 5372, 5396 and 5373, 5396 and 5374, 5396 and 5375, 5396 and 5376, 5396 and 5377, 5396 and 5378, 5396 and 5379, 5396 and 5380, 5397 and 5370, 5397 and 5371, 5397 and 5372, 5397 and 5373, 5397 and 5374, 5397 and 5375, 5397 and 5376, 5397 and 5377, 5397 and 5378, 5397 and 5379, 5397 and 5380, 5398 and 5370, 5398 and 5371, 5398 and 5372, 5398 and 5373, 5398 and 5374, 5398 and 5375, 5398 and 5376, 5398 and 5377, 5398 and 5378, 5398 and 5379, 5398 and 5380, 5399 and 5370, 5399 and 5371, 5399 and 5372, 5399 and 5373, 5399 and 5374, 5399 and 5375, 5399 and 5376, 5399 and 5377, 5399 and 5378, 5399 and 5379, 5399 and 5380, 5400 and 5370, 5400 and 5371, 5400 and 5372, 5400 and 5373, 5400 and 5374, 5400 and 5375, 5400 and 5376, 5400 and 5377, 5400 and 5378, 5400 and 5379, 5400 and 5380, 5401 and 5370, 5401 and 5371, 5401 and 5372, 5401 and 5373, 5401 and 5374, 5401 and 5375, 5401 and 5376, 5401 and 5377, 5401 and 5378, 5401 and 5379, or 5401 and 5380. The gRNA core of the PEgRNA can comprise SEQ ID NO. 5857-5859. Such PEgRNA sequences may further comprise a 3′ motif at the 3′ end of the extension arm, for example, a hairpin-forming motif or a series of 3, 4 or more U nucleotides. Without being bound by theory, such 3′ motifs are believed to increase PEgRNA stability. Such PEgRNA sequences may alternatively or additionally be adapted for transcription from a DNA template, for example, by including a 5′ terminal G if the spacer of the PEgRNA begins with another nucleotide, by including 6 or 7 U nucleotides at the 3′ end of the extension arm, or both. Such plasmid adapted sequences may further comprise a hairpin-forming motif between the PBS and the 3′ terminal U series.

[0309] Any of the PEgRNAs of Table 23 can be used in a Prime Editing system further comprising a nick guide RNA (ngRNA). Such ngRNA can comprise a spacer comprising nucleotides 5-20 of SEQ ID NO: 2048, 2052, 2070, 2080, 2085, 2086, 2088, 2089, 2091, 2423, 2424, 2425, 2426, 2427, 2428, 2429, 2430, 2431, 2432, 2433, 2434, 2435, 2436, 2438, 2439, 2440, 2443, 2444, 5402, 5403, 5404, or 5405 and a gRNA core capable of binding to a Cas9 protein. The spacer of the ngRNA can comprise nucleotides 4-20, 3-20, 2-20, or 1-20 of SEQ ID NO: 2048, 2052, 2070, 2080, 2085, 2086, 2088, 2089, 2091, 2423, 2424, 2425, 2426, 2427, 2428, 2429, 2430, 2431, 2432, 2433, 2434, 2435, 2436, 2438, 2439, 2440, 2443, 2444, 5402, 5403, 5404, or 5405. The spacer of the ngRNA can comprise SEQ ID NO: 2048, 2052, 2070, 2080, 2085, 2086, 2088, 2089, 2091, 2423, 2424, 2425, 2426, 2427, 2428, 2429, 2430, 2431, 2432, 2433, 2434, 2435, 2436, 2438, 2439, 2440, 2443, 2444, 5402, 5403, 5404, or 5405. The gRNA core of the ngRNA can comprise SEQ ID NO. 5857-5859. Exemplary ngRNA provided in Table 23 can comprise SEQ ID NO: 2257, 2259, 2260, 2261, 2262, 2264, 2270, 2272, 2274, 2275, 2276, 2278, 2280, 2282, 2283, 2284, 2285, 2288, 4411, 4412, 4413, 4415, 4416, 4417, 4419, 4420, or 4421. Such ngRNA sequences may further comprise a 3′ motif at the 3′ end of the gRNA core, for example, a series of 3, 4 or more U nucleotides. Exemplary ngRNA sequences with such 3′ adaptations include SEQ ID NOs: 2292 and 4424. Without being bound by theory, such 3′ motifs are believed to increase ngRNA stability.

[0310] Table 24 provides Prime Editing guide RNAs (PEgRNAs), which can be used in Prime Editing systems disclosed herein. Such Prime Editing systems can comprise a Cas9 protein capable of recognizing an NG PAM sequence (e.g., TG), and a reverse transcriptase. The Prime Editing systems (e.g., PE3 or PE3b systems) can further comprise a nick guide RNA (ngRNA). Such PEgRNAs and Prime Editing systems can be used, for example, to correct an H1069Q mutation in ATP7B.

[0311] The PEgRNAs of Table 24 comprise: (a) a spacer comprising nucleotides 5-20 of SEQ ID NO: 5406, (b) a gRNA core capable of binding to a Cas9 protein, and (c) an extension arm comprising: (i) an editing template comprising any one of SEQ ID NOs: 5418-5422, and (ii) a primer binding site (PBS) comprising any one of SEQ ID NOs: 5407-5417. The spacer of the PEgRNA can comprise, for example, nucleotides 4-20, 3-20, 2-20, or 1-20 of SEQ ID NO: 5406. The spacer of the PEgRNA can comprise SEQ ID NO: 5406. The RTT and the PBS can comprise respectively SEQ ID NOs: 5418 and 5407, 5418 and 5408, 5418 and 5409, 5418 and 5410, 5418 and 5411, 5418 and 5412, 5418 and 5413, 5418 and 5414, 5418 and 5415, 5418 and 5416, 5418 and 5417, 5419 and 5407, 5419 and 5408, 5419 and 5409, 5419 and 5410, 5419 and 5411, 5419 and 5412, 5419 and 5413, 5419 and 5414, 5419 and 5415, 5419 and 5416, 5419 and 5417, 5420 and 5407, 5420 and 5408, 5420 and 5409, 5420 and 5410, 5420 and 5411, 5420 and 5412, 5420 and 5413, 5420 and 5414, 5420 and 5415, 5420 and 5416, 5420 and 5417, 5421 and 5407, 5421 and 5408, 5421 and 5409, 5421 and 5410, 5421 and 5411, 5421 and 5412, 5421 and 5413, 5421 and 5414, 5421 and 5415, 5421 and 5416, 5421 and 5417, 5422 and 5407, 5422 and 5408, 5422 and 5409, 5422 and 5410, 5422 and 5411, 5422 and 5412, 5422 and 5413, 5422 and 5414, 5422 and 5415, 5422 and 5416, or 5422 and 5417. The gRNA core of the PEgRNA can comprise SEQ ID NO. 5857-5859. Such PEgRNA sequences may further comprise a 3′ motif at the 3′ end of the extension arm, for example, a hairpin-forming motif or a series of 3, 4 or more U nucleotides. Without being bound by theory, such 3′ motifs are believed to increase PEgRNA stability. Such PEgRNA sequences may alternatively or additionally be adapted for transcription from a DNA template, for example, by including a 5′ terminal G if the spacer of the PEgRNA begins with another nucleotide, by including 6 or 7 U nucleotides at the 3′ end of the extension arm, or both. Such plasmid adapted sequences may further comprise a hairpin-forming motif between the PBS and the 3′ terminal U series.

[0312] Any of the PEgRNAs of Table 24 can be used in a Prime Editing system further comprising a nick guide RNA (ngRNA). Such ngRNA can comprise a spacer comprising nucleotides 5-20 of SEQ ID NO: 18, 19, 20, 21, 22, 23, 24, 25, 26, 27, 28, 29, 30, 31, 32, 33, 34, 35, 36, 37, 38, 39, 40, 42, 43, 44, 45, 46, 47, 48, 49, 50, 51, 52, 53, 54, 55, 56, 57, 58, 59, 67, 68, 70, 72, 199, 200, 203, 529, 736, 737, 739, or 740 and a gRNA core capable of binding to a Cas9 protein. The spacer of the ngRNA can comprise nucleotides 4-20, 3-20, 2-20, or 1-20 of SEQ ID NO: 18, 19, 20, 21, 22, 23, 24, 25, 26, 27, 28, 29, 30, 31, 32, 33, 34, 35, 36, 37, 38, 39, 40, 42, 43, 44, 45, 46, 47, 48, 49, 50, 51, 52, 53, 54, 55, 56, 57, 58, 59, 67, 68, 70, 72, 199, 200, 203, 529, 736, 737, 739, or 740. The spacer of the ngRNA can comprise SEQ ID NO: 18, 19, 20, 21, 22, 23, 24, 25, 26, 27, 28, 29, 30, 31, 32, 33, 34, 35, 36, 37, 38, 39, 40, 42, 43, 44, 45, 46, 47, 48, 49, 50, 51, 52, 53, 54, 55, 56, 57, 58, 59, 67, 68, 70, 72, 199, 200, 203, 529, 736, 737, 739, or 740. The gRNA core of the ngRNA can comprise SEQ ID NO. 5857-5859. Exemplary ngRNA provided in Table 24 can comprise SEQ ID NO: 153, 154, 155, 156, 157, 158, 159, 160, 161, 162, 163, 164, 165, 166, 167, 168, 169, 170, 171, 172, 173, 174, 175, 176, 177, 178, 179, 180, 181, 290, 291, 292, 293, 681, 1501, 1503, or 1504. Such ngRNA sequences may further comprise a 3′ motif at the 3′ end of the gRNA core, for example, a series of 3, 4 or more U nucleotides. Without being bound by theory, such 3′ motifs are believed to increase ngRNA stability.

[0313] Table 25 provides Prime Editing guide RNAs (PEgRNAs), which can be used in Prime Editing systems disclosed herein. Such Prime Editing systems can comprise a Cas9 protein capable of recognizing an NG PAM sequence (e.g., GG), and a reverse transcriptase. The Prime Editing systems (e.g., PE3 or PE3b systems) can further comprise a nick guide RNA (ngRNA). Such PEgRNAs and Prime Editing systems can be used, for example, to correct an H1069Q mutation in ATP7B.

[0314] The PEgRNAs of Table 25 comprise: (a) a spacer comprising nucleotides 5-20 of SEQ ID NO: 5423, (b) a gRNA core capable of binding to a Cas9 protein, and (c) an extension arm comprising: (i) an editing template comprising any one of SEQ ID NOs: 5435-5445, and (ii) a primer binding site (PBS) comprising any one of SEQ ID NOs: 5424-5434. The spacer of the PEgRNA can comprise, for example, nucleotides 4-20, 3-20, 2-20, or 1-20 of SEQ ID NO: 5423. The spacer of the PEgRNA can comprise SEQ ID NO: 5423. The RTT and the PBS can comprise respectively SEQ ID NOs: 5435 and 5424, 5435 and 5425, 5435 and 5426, 5435 and 5427, 5435 and 5428, 5435 and 5429, 5435 and 5430, 5435 and 5431, 5435 and 5432, 5435 and 5433, 5435 and 5434, 5436 and 5424, 5436 and 5425, 5436 and 5426, 5436 and 5427, 5436 and 5428, 5436 and 5429, 5436 and 5430, 5436 and 5431, 5436 and 5432, 5436 and 5433, 5436 and 5434, 5437 and 5424, 5437 and 5425, 5437 and 5426, 5437 and 5427, 5437 and 5428, 5437 and 5429, 5437 and 5430, 5437 and 5431, 5437 and 5432, 5437 and 5433, 5437 and 5434, 5438 and 5424, 5438 and 5425, 5438 and 5426, 5438 and 5427, 5438 and 5428, 5438 and 5429, 5438 and 5430, 5438 and 5431, 5438 and 5432, 5438 and 5433, 5438 and 5434, 5439 and 5424, 5439 and 5425, 5439 and 5426, 5439 and 5427, 5439 and 5428, 5439 and 5429, 5439 and 5430, 5439 and 5431, 5439 and 5432, 5439 and 5433, 5439 and 5434, 5440 and 5424, 5440 and 5425, 5440 and 5426, 5440 and 5427, 5440 and 5428, 5440 and 5429, 5440 and 5430, 5440 and 5431, 5440 and 5432, 5440 and 5433, 5440 and 5434, 5441 and 5424, 5441 and 5425, 5441 and 5426, 5441 and 5427, 5441 and 5428, 5441 and 5429, 5441 and 5430, 5441 and 5431, 5441 and 5432, 5441 and 5433, 5441 and 5434, 5442 and 5424, 5442 and 5425, 5442 and 5426, 5442 and 5427, 5442 and 5428, 5442 and 5429, 5442 and 5430, 5442 and 5431, 5442 and 5432, 5442 and 5433, 5442 and 5434, 5443 and 5424, 5443 and 5425, 5443 and 5426, 5443 and 5427, 5443 and 5428, 5443 and 5429, 5443 and 5430, 5443 and 5431, 5443 and 5432, 5443 and 5433, 5443 and 5434, 5444 and 5424, 5444 and 5425, 5444 and 5426, 5444 and 5427, 5444 and 5428, 5444 and 5429, 5444 and 5430, 5444 and 5431, 5444 and 5432, 5444 and 5433, 5444 and 5434, 5445 and 5424, 5445 and 5425, 5445 and 5426, 5445 and 5427, 5445 and 5428, 5445 and 5429, 5445 and 5430, 5445 and 5431, 5445 and 5432, 5445 and 5433, or 5445 and 5434. The gRNA core of the PEgRNA can comprise SEQ ID NO. 5857-5859. Such PEgRNA sequences may further comprise a 3′ motif at the 3′ end of the extension arm, for example, a hairpin-forming motif or a series of 3, 4 or more U nucleotides. Without being bound by theory, such 3′ motifs are believed to increase PEgRNA stability. Such PEgRNA sequences may alternatively or additionally be adapted for transcription from a DNA template, for example, by including a 5′ terminal G if the spacer of the PEgRNA begins with another nucleotide, by including 6 or 7 U nucleotides at the 3′ end of the extension arm, or both. Such plasmid adapted sequences may further comprise a hairpin-forming motif between the PBS and the 3′ terminal U series.

[0315] Any of the PEgRNAs of Table 25 can be used in a Prime Editing system further comprising a nick guide RNA (ngRNA). Such ngRNA can comprise a spacer comprising nucleotides 5-20 of SEQ ID NO: 18, 19, 20, 21, 22, 23, 24, 25, 26, 27, 28, 29, 30, 31, 32, 33, 34, 35, 36, 37, 38, 39, 40, 42, 43, 44, 45, 46, 47, 48, 49, 50, 51, 52, 53, 54, 55, 56, 57, 58, 59, 67, 68, 70, 72, 199, 200, 203, 529, 736, 737, 738, 739, 740, or 5280 and a gRNA core capable of binding to a Cas9 protein. The spacer of the ngRNA can comprise nucleotides 4-20, 3-20, 2-20, or 1-20 of SEQ ID NO: 18, 19, 20, 21, 22, 23, 24, 25, 26, 27, 28, 29, 30, 31, 32, 33, 34, 35, 36, 37, 38, 39, 40, 42, 43, 44, 45, 46, 47, 48, 49, 50, 51, 52, 53, 54, 55, 56, 57, 58, 59, 67, 68, 70, 72, 199, 200, 203, 529, 736, 737, 738, 739, 740, or 5280. The spacer of the ngRNA can comprise SEQ ID NO: 18, 19, 20, 21, 22, 23, 24, 25, 26, 27, 28, 29, 30, 31, 32, 33, 34, 35, 36, 37, 38, 39, 40, 42, 43, 44, 45, 46, 47, 48, 49, 50, 51, 52, 53, 54, 55, 56, 57, 58, 59, 67, 68, 70, 72, 199, 200, 203, 529, 736, 737, 738, 739, 740, or 5280. The gRNA core of the ngRNA can comprise SEQ ID NO. 5857-5859. Exemplary ngRNA provided in Table 25 can comprise SEQ ID NO: 153, 154, 155, 156, 157, 158, 159, 160, 161, 162, 163, 164, 165, 166, 167, 168, 169, 170, 171, 172, 173, 174, 175, 176, 177, 178, 179, 180, 181, 290, 291, 292, 293, 681, 1501, 1502, 1503, or 1504. Such ngRNA sequences may further comprise a 3′ motif at the 3′ end of the gRNA core, for example, a series of 3, 4 or more U nucleotides. Without being bound by theory, such 3′ motifs are believed to increase ngRNA stability.

[0316] Table 26 provides Prime Editing guide RNAs (PEgRNAs), which can be used in Prime Editing systems disclosed herein. Such Prime Editing systems can comprise a Cas9 protein capable of recognizing an NG or NNNRRT PAM sequence (e.g., AG or AGCAGT), and a reverse transcriptase. The Prime Editing systems (e.g., PE3 or PE3b systems) can further comprise a nick guide RNA (ngRNA). Such PEgRNAs and Prime Editing systems can be used, for example, to correct an H1069Q mutation in ATP7B.

[0317] The PEgRNAs of Table 26 comprise: (a) a spacer comprising nucleotides 5-20 of SEQ ID NO: 5446, (b) a gRNA core capable of binding to a Cas9 protein, and (c) an extension arm comprising: (i) an editing template comprising any one of SEQ ID NOs: 5458-5472, and (ii) a primer binding site (PBS) comprising any one of SEQ ID NOs: 5447-5457. The spacer of the PEgRNA can comprise, for example, nucleotides 4-20, 3-20, 2-20, or 1-20 of SEQ ID NO: 5446. The spacer of the PEgRNA can comprise SEQ ID NO: 5446. The RTT and the PBS can comprise respectively SEQ ID NOs: 5458 and 5447, 5458 and 5448, 5458 and 5449, 5458 and 5450, 5458 and 5451, 5458 and 5452, 5458 and 5453, 5458 and 5454, 5458 and 5455, 5458 and 5456, 5458 and 5457, 5459 and 5447, 5459 and 5448, 5459 and 5449, 5459 and 5450, 5459 and 5451, 5459 and 5452, 5459 and 5453, 5459 and 5454, 5459 and 5455, 5459 and 5456, 5459 and 5457, 5460 and 5447, 5460 and 5448, 5460 and 5449, 5460 and 5450, 5460 and 5451, 5460 and 5452, 5460 and 5453, 5460 and 5454, 5460 and 5455, 5460 and 5456, 5460 and 5457, 5461 and 5447, 5461 and 5448, 5461 and 5449, 5461 and 5450, 5461 and 5451, 5461 and 5452, 5461 and 5453, 5461 and 5454, 5461 and 5455, 5461 and 5456, 5461 and 5457, 5462 and 5447, 5462 and 5448, 5462 and 5449, 5462 and 5450, 5462 and 5451, 5462 and 5452, 5462 and 5453, 5462 and 5454, 5462 and 5455, 5462 and 5456, 5462 and 5457, 5463 and 5447, 5463 and 5448, 5463 and 5449, 5463 and 5450, 5463 and 5451, 5463 and 5452, 5463 and 5453, 5463 and 5454, 5463 and 5455, 5463 and 5456, 5463 and 5457, 5464 and 5447, 5464 and 5448, 5464 and 5449, 5464 and 5450, 5464 and 5451, 5464 and 5452, 5464 and 5453, 5464 and 5454, 5464 and 5455, 5464 and 5456, 5464 and 5457, 5465 and 5447, 5465 and 5448, 5465 and 5449, 5465 and 5450, 5465 and 5451, 5465 and 5452, 5465 and 5453, 5465 and 5454, 5465 and 5455, 5465 and 5456, 5465 and 5457, 5466 and 5447, 5466 and 5448, 5466 and 5449, 5466 and 5450, 5466 and 5451, 5466 and 5452, 5466 and 5453, 5466 and 5454, 5466 and 5455, 5466 and 5456, 5466 and 5457, 5467 and 5447, 5467 and 5448, 5467 and 5449, 5467 and 5450, 5467 and 5451, 5467 and 5452, 5467 and 5453, 5467 and 5454, 5467 and 5455, 5467 and 5456, 5467 and 5457, 5468 and 5447, 5468 and 5448, 5468 and 5449, 5468 and 5450, 5468 and 5451, 5468 and 5452, 5468 and 5453, 5468 and 5454, 5468 and 5455, 5468 and 5456, 5468 and 5457, 5469 and 5447, 5469 and 5448, 5469 and 5449, 5469 and 5450, 5469 and 5451, 5469 and 5452, 5469 and 5453, 5469 and 5454, 5469 and 5455, 5469 and 5456, 5469 and 5457, 5470 and 5447, 5470 and 5448, 5470 and 5449, 5470 and 5450, 5470 and 5451, 5470 and 5452, 5470 and 5453, 5470 and 5454, 5470 and 5455, 5470 and 5456, 5470 and 5457, 5471 and 5447, 5471 and 5448, 5471 and 5449, 5471 and 5450, 5471 and 5451, 5471 and 5452, 5471 and 5453, 5471 and 5454, 5471 and 5455, 5471 and 5456, 5471 and 5457, 5472 and 5447, 5472 and 5448, 5472 and 5449, 5472 and 5450, 5472 and 5451, 5472 and 5452, 5472 and 5453, 5472 and 5454, 5472 and 5455, 5472 and 5456, or 5472 and 5457. The gRNA core of the PEgRNA can comprise SEQ ID NO, 5857-5859. Such PEgRNA sequences may further comprise a 3′ motif at the 3′ end of the extension arm, for example, a hairpin-forming motif or a series of 3, 4 or more U nucleotides. Without being bound by theory, such 3′ motifs are believed to increase PEgRNA stability. Such PEgRNA sequences may alternatively or additionally be adapted for transcription from a DNA template, for example, by including a 5′ terminal G if the spacer of the PEgRNA begins with another nucleotide, by including 6 or 7 U nucleotides at the 3′ end of the extension arm, or both. Such plasmid adapted sequences may further comprise a hairpin-forming motif between the PBS and the 3′ terminal U series.

[0318] Any of the PEgRNAs of Table 26 can be used in a Prime Editing system further comprising a nick guide RNA (ngRNA). Such ngRNA can comprise a spacer comprising nucleotides 5-20 of SEQ ID NO: 18, 19, 20, 21, 22, 23, 24, 25, 26, 27, 28, 29, 30, 31, 32, 33, 34, 35, 36, 37, 38, 39, 40, 42, 43, 44, 45, 46, 47, 48, 49, 50, 51, 52, 53, 54, 55, 56, 57, 58, 59, 67, 68, 70, 72, 199, 200, 201, 203, 529, 736, 737, 738, 739, 740, 5280, or 5281 and a gRNA core capable of binding to a Cas9 protein. The spacer of the ngRNA can comprise nucleotides 4-20, 3-20, 2-20, or 1-20 of SEQ ID NO: 18, 19, 20, 21, 22, 23, 24, 25, 26, 27, 28, 29, 30, 31, 32, 33, 34, 35, 36, 37, 38, 39, 40, 42, 43, 44, 45, 46, 47, 48, 49, 50, 51, 52, 53, 54, 55, 56, 57, 58, 59, 67, 68, 70, 72, 199, 200, 201, 203, 529, 736, 737, 738, 739, 740, 5280, or 5281. The spacer of the ngRNA can comprise SEQ ID NO: 18, 19, 20, 21, 22, 23, 24, 25, 26, 27, 28, 29, 30, 31, 32, 33, 34, 35, 36, 37, 38, 39, 40, 42, 43, 44, 45, 46, 47, 48, 49, 50, 51, 52, 53, 54, 55, 56, 57, 58, 59, 67, 68, 70, 72, 199, 200, 201, 203, 529, 736, 737, 738, 739, 740, 5280, or 5281. The gRNA core of the ngRNA can comprise SEQ ID NO. 5857-5859. Exemplary ngRNA provided in Table 26 can comprise SEQ ID NO: 153, 154, 155, 156, 157, 158, 159, 160, 161, 162, 163, 164, 165, 166, 167, 168, 169, 170, 171, 172, 173, 174, 175, 176, 177, 178, 179, 180, 181, 290, 291, 292, 293, 681, 1501, 1502, 1503, or 1504. Such ngRNA sequences may further comprise a 3′ motif at the 3′ end of the gRNA core, for example, a series of 3, 4 or more U nucleotides. Without being bound by theory, such 3′ motifs are believed to increase ngRNA stability.

[0319] Table 27 provides Prime Editing guide RNAs (PEgRNAs), which can be used in Prime Editing systems disclosed herein. Such Prime Editing systems can comprise a Cas9 protein capable of recognizing an NG PAM sequence (e.g., AG), and a reverse transcriptase. The Prime Editing systems (e.g., PE3 or PE3b systems) can further comprise a nick guide RNA (ngRNA). Such PEgRNAs and Prime Editing systems can be used, for example, to correct an H1069Q mutation in ATP7B.

[0320] The PEgRNAs of Table 27 comprise: (a) a spacer comprising nucleotides 5-20 of SEQ ID NO: 5473, (b) a gRNA core capable of binding to a Cas9 protein, and (c) an extension arm comprising: (i) an editing template comprising any one of SEQ ID NOs: 5485-5502, and (ii) a primer binding site (PBS) comprising any one of SEQ ID NOs: 5474-5484. The spacer of the PEgRNA can comprise, for example, nucleotides 4-20, 3-20, 2-20, or 1-20 of SEQ ID NO: 5473. The spacer of the PEgRNA can comprise SEQ ID NO: 5473. The RTT and the PBS can comprise respectively SEQ ID NOs: 5485 and 5474, 5485 and 5475, 5485 and 5476, 5485 and 5477, 5485 and 5478, 5485 and 5479, 5485 and 5480, 5485 and 5481, 5485 and 5482, 5485 and 5483, 5485 and 5484, 5486 and 5474, 5486 and 5475, 5486 and 5476, 5486 and 5477, 5486 and 5478, 5486 and 5479, 5486 and 5480, 5486 and 5481, 5486 and 5482, 5486 and 5483, 5486 and 5484, 5487 and 5474, 5487 and 5475, 5487 and 5476, 5487 and 5477, 5487 and 5478, 5487 and 5479, 5487 and 5480, 5487 and 5481, 5487 and 5482, 5487 and 5483, 5487 and 5484, 5488 and 5474, 5488 and 5475, 5488 and 5476, 5488 and 5477, 5488 and 5478, 5488 and 5479, 5488 and 5480, 5488 and 5481, 5488 and 5482, 5488 and 5483, 5488 and 5484, 5489 and 5474, 5489 and 5475, 5489 and 5476, 5489 and 5477, 5489 and 5478, 5489 and 5479, 5489 and 5480, 5489 and 5481, 5489 and 5482, 5489 and 5483, 5489 and 5484, 5490 and 5474, 5490 and 5475, 5490 and 5476, 5490 and 5477, 5490 and 5478, 5490 and 5479, 5490 and 5480, 5490 and 5481, 5490 and 5482, 5490 and 5483, 5490 and 5484, 5491 and 5474, 5491 and 5475, 5491 and 5476, 5491 and 5477, 5491 and 5478, 5491 and 5479, 5491 and 5480, 5491 and 5481, 5491 and 5482, 5491 and 5483, 5491 and 5484, 5492 and 5474, 5492 and 5475, 5492 and 5476, 5492 and 5477, 5492 and 5478, 5492 and 5479, 5492 and 5480, 5492 and 5481, 5492 and 5482, 5492 and 5483, 5492 and 5484, 5493 and 5474, 5493 and 5475, 5493 and 5476, 5493 and 5477, 5493 and 5478, 5493 and 5479, 5493 and 5480, 5493 and 5481, 5493 and 5482, 5493 and 5483, 5493 and 5484, 5494 and 5474, 5494 and 5475, 5494 and 5476, 5494 and 5477, 5494 and 5478, 5494 and 5479, 5494 and 5480, 5494 and 5481, 5494 and 5482, 5494 and 5483, 5494 and 5484, 5495 and 5474, 5495 and 5475, 5495 and 5476, 5495 and 5477, 5495 and 5478, 5495 and 5479, 5495 and 5480, 5495 and 5481, 5495 and 5482, 5495 and 5483, 5495 and 5484, 5496 and 5474, 5496 and 5475, 5496 and 5476, 5496 and 5477, 5496 and 5478, 5496 and 5479, 5496 and 5480, 5496 and 5481, 5496 and 5482, 5496 and 5483, 5496 and 5484, 5497 and 5474, 5497 and 5475, 5497 and 5476, 5497 and 5477, 5497 and 5478, 5497 and 5479, 5497 and 5480, 5497 and 5481, 5497 and 5482, 5497 and 5483, 5497 and 5484, 5498 and 5474, 5498 and 5475, 5498 and 5476, 5498 and 5477, 5498 and 5478, 5498 and 5479, 5498 and 5480, 5498 and 5481, 5498 and 5482, 5498 and 5483, 5498 and 5484, 5499 and 5474, 5499 and 5475, 5499 and 5476, 5499 and 5477, 5499 and 5478, 5499 and 5479, 5499 and 5480, 5499 and 5481, 5499 and 5482, 5499 and 5483, 5499 and 5484, 5500 and 5474, 5500 and 5475, 5500 and 5476, 5500 and 5477, 5500 and 5478, 5500 and 5479, 5500 and 5480, 5500 and 5481, 5500 and 5482, 5500 and 5483, 5500 and 5484, 5501 and 5474, 5501 and 5475, 5501 and 5476, 5501 and 5477, 5501 and 5478, 5501 and 5479, 5501 and 5480, 5501 and 5481, 5501 and 5482, 5501 and 5483, 5501 and 5484, 5502 and 5474, 5502 and 5475, 5502 and 5476, 5502 and 5477, 5502 and 5478, 5502 and 5479, 5502 and 5480, 5502 and 5481, 5502 and 5482, 5502 and 5483, or 5502 and 5484. The gRNA core of the PEgRNA can comprise SEQ ID NO. 5857-5859. Such PEgRNA sequences may further comprise a 3′ motif at the 3′ end of the extension arm, for example, a hairpin-forming motif or a series of 3, 4 or more U nucleotides. Without being bound by theory, such 3′ motifs are believed to increase PEgRNA stability. Such PEgRNA sequences may alternatively or additionally be adapted for transcription from a DNA template, for example, by including a 5′ terminal G if the spacer of the PEgRNA begins with another nucleotide, by including 6 or 7 U nucleotides at the 3′ end of the extension arm, or both. Such plasmid adapted sequences may further comprise a hairpin-forming motif between the PBS and the 3′ terminal U series.

[0321] Any of the PEgRNAs of Table 27 can be used in a Prime Editing system further comprising a nick guide RNA (ngRNA). Such ngRNA can comprise a spacer comprising nucleotides 5-20 of SEQ ID NO: 18, 19, 20, 21, 22, 23, 24, 25, 26, 27, 28, 29, 30, 31, 32, 33, 34, 35, 36, 37, 38, 39, 40, 42, 43, 44, 45, 46, 47, 48, 49, 50, 51, 52, 53, 54, 55, 56, 57, 58, 59, 67, 68, 70, 72, 199, 200, 203, 529, 736, 737, 738, 739, 740, 5280, or 5281 and a gRNA core capable of binding to a Cas9 protein. The spacer of the ngRNA can comprise nucleotides 4-20, 3-20, 2-20, or 1-20 of SEQ ID NO: 18, 19, 20, 21, 22, 23, 24, 25, 26, 27, 28, 29, 30, 31, 32, 33, 34, 35, 36, 37, 38, 39, 40, 42, 43, 44, 45, 46, 47, 48, 49, 50, 51, 52, 53, 54, 55, 56, 57, 58, 59, 67, 68, 70, 72, 199, 200, 203, 529, 736, 737, 738, 739, 740, 5280, or 5281. The spacer of the ngRNA can comprise SEQ ID NO: 18, 19, 20, 21, 22, 23, 24, 25, 26, 27, 28, 29, 30, 31, 32, 33, 34, 35, 36, 37, 38, 39, 40, 42, 43, 44, 45, 46, 47, 48, 49, 50, 51, 52, 53, 54, 55, 56, 57, 58, 59, 67, 68, 70, 72, 199, 200, 203, 529, 736, 737, 738, 739, 740, 5280, or 5281. The gRNA core of the ngRNA can comprise SEQ ID NO. 5857-5859. Exemplary ngRNA provided in Table 27 can comprise SEQ ID NO: 153, 154, 155, 156, 157, 158, 159, 160, 161, 162, 163, 164, 165, 166, 167, 168, 169, 170, 171, 172, 173, 174, 175, 176, 177, 178, 179, 180, 181, 290, 291, 292, 293, 681, 1501, 1502, 1503, or 1504. Such ngRNA sequences may further comprise a 3′ motif at the 3′ end of the gRNA core, for example, a series of 3, 4 or more U nucleotides. Without being bound by theory, such 3′ motifs are believed to increase ngRNA stability.

[0322] Table 28 provides Prime Editing guide RNAs (PEgRNAs), which can be used in Prime Editing systems disclosed herein. Such Prime Editing systems can comprise a Cas9 protein capable of recognizing an NG PAM sequence (e.g., TG), and a reverse transcriptase. The Prime Editing systems (e.g., PE3 or PE3b systems) can further comprise a nick guide RNA (ngRNA). Such PEgRNAs and Prime Editing systems can be used, for example, to correct an H1069Q mutation in ATP7B.

[0323] The PEgRNAs of Table 28 comprise: (a) a spacer comprising nucleotides 5-20 of SEQ ID NO: 5503, (b) a gRNA core capable of binding to a Cas9 protein, and (c) an extension arm comprising: (i) an editing template comprising any one of SEQ ID NOs: 5515-5535, and (ii) a primer binding site (PBS) comprising any one of SEQ ID NOs: 5504-5514. The spacer of the PEgRNA can comprise, for example, nucleotides 4-20, 3-20, 2-20, or 1-20 of SEQ ID NO: 5503. The spacer of the PEgRNA can comprise SEQ ID NO: 5503. The RTT and the PBS can comprise respectively SEQ ID NOs: 5515 and 5504, 5515 and 5505, 5515 and 5506, 5515 and 5507, 5515 and 5508, 5515 and 5509, 5515 and 5510, 5515 and 5511, 5515 and 5512, 5515 and 5513, 5515 and 5514, 5516 and 5504, 5516 and 5505, 5516 and 5506, 5516 and 5507, 5516 and 5508, 5516 and 5509, 5516 and 5510, 5516 and 5511, 5516 and 5512, 5516 and 5513, 5516 and 5514, 5517 and 5504, 5517 and 5505, 5517 and 5506, 5517 and 5507, 5517 and 5508, 5517 and 5509, 5517 and 5510, 5517 and 5511, 5517 and 5512, 5517 and 5513, 5517 and 5514, 5518 and 5504, 5518 and 5505, 5518 and 5506, 5518 and 5507, 5518 and 5508, 5518 and 5509, 5518 and 5510, 5518 and 5511, 5518 and 5512, 5518 and 5513, 5518 and 5514, 5519 and 5504, 5519 and 5505, 5519 and 5506, 5519 and 5507, 5519 and 5508, 5519 and 5509, 5519 and 5510, 5519 and 5511, 5519 and 5512, 5519 and 5513, 5519 and 5514, 5520 and 5504, 5520 and 5505, 5520 and 5506, 5520 and 5507, 5520 and 5508, 5520 and 5509, 5520 and 5510, 5520 and 5511, 5520 and 5512, 5520 and 5513, 5520 and 5514, 5521 and 5504, 5521 and 5505, 5521 and 5506, 5521 and 5507, 5521 and 5508, 5521 and 5509, 5521 and 5510, 5521 and 5511, 5521 and 5512, 5521 and 5513, 5521 and 5514, 5522 and 5504, 5522 and 5505, 5522 and 5506, 5522 and 5507, 5522 and 5508, 5522 and 5509, 5522 and 5510, 5522 and 5511, 5522 and 5512, 5522 and 5513, 5522 and 5514, 5523 and 5504, 5523 and 5505, 5523 and 5506, 5523 and 5507, 5523 and 5508, 5523 and 5509, 5523 and 5510, 5523 and 5511, 5523 and 5512, 5523 and 5513, 5523 and 5514, 5524 and 5504, 5524 and 5505, 5524 and 5506, 5524 and 5507, 5524 and 5508, 5524 and 5509, 5524 and 5510, 5524 and 5511, 5524 and 5512, 5524 and 5513, 5524 and 5514, 5525 and 5504, 5525 and 5505, 5525 and 5506, 5525 and 5507, 5525 and 5508, 5525 and 5509, 5525 and 5510, 5525 and 5511, 5525 and 5512, 5525 and 5513, 5525 and 5514, 5526 and 5504, 5526 and 5505, 5526 and 5506, 5526 and 5507, 5526 and 5508, 5526 and 5509, 5526 and 5510, 5526 and 5511, 5526 and 5512, 5526 and 5513, 5526 and 5514, 5527 and 5504, 5527 and 5505, 5527 and 5506, 5527 and 5507, 5527 and 5508, 5527 and 5509, 5527 and 5510, 5527 and 5511, 5527 and 5512, 5527 and 5513, 5527 and 5514, 5528 and 5504, 5528 and 5505, 5528 and 5506, 5528 and 5507, 5528 and 5508, 5528 and 5509, 5528 and 5510, 5528 and 5511, 5528 and 5512, 5528 and 5513, 5528 and 5514, 5529 and 5504, 5529 and 5505, 5529 and 5506, 5529 and 5507, 5529 and 5508, 5529 and 5509, 5529 and 5510, 5529 and 5511, 5529 and 5512, 5529 and 5513, 5529 and 5514, 5530 and 5504, 5530 and 5505, 5530 and 5506, 5530 and 5507, 5530 and 5508, 5530 and 5509, 5530 and 5510, 5530 and 5511, 5530 and 5512, 5530 and 55131, 5530 and 5514, 5531 and 5504, 5531 and 5505, 5531 and 5506, 5531 and 5507, 5531 and 5508, 5531 and 5509, 5531 and 5510, 5531 and 5511, 5531 and 5512, 5531 and 5513, 5531 and 5514, 5532 and 5504, 5532 and 5505, 5532 and 5506, 5532 and 5507, 5532 and 5508, 5532 and 5509, 5532 and 5510, 5532 and 5511, 5532 and 5512, 5532 and 5513, 5532 and 5514, 5533 and 5504, 5533 and 5505, 5533 and 5506, 5533 and 5507, 5533 and 5508, 5533 and 5509, 5533 and 5510, 5533 and 5511, 5533 and 5512, 5533 and 5513, 5533 and 5514, 5534 and 5504, 5534 and 5505, 5534 and 5506, 5534 and 5507, 5534 and 5508, 5534 and 5509, 5534 and 5510, 5534 and 5511, 5534 and 5512, 5534 and 5513, 5534 and 5514, 5535 and 5504, 5535 and 5505, 5535 and 5506, 5535 and 5507, 5535 and 5508, 5535 and 5509, 5535 and 5510, 5535 and 5511, 5535 and 5512, 5535 and 5513, or 5535 and 5514. The gRNA core of the PEgRNA can comprise SEQ ID NO. 5857-5859. Such PEgRNA sequences may further comprise a 3′ motif at the 3′ end of the extension arm, for example, a hairpin-forming motif or a series of 3, 4 or more U nucleotides. Without being bound by theory, such 3′ motifs are believed to increase PEgRNA stability. Such PEgRNA sequences may alternatively or additionally be adapted for transcription from a DNA template, for example, by including a 5′ terminal G if the spacer of the PEgRNA begins with another nucleotide, by including 6 or 7 U nucleotides at the 3′ end of the extension arm, or both. Such plasmid adapted sequences may further comprise a hairpin-forming motif between the PBS and the 3′ terminal U series.

[0324] Any of the PEgRNAs of Table 28 can be used in a Prime Editing system further comprising a nick guide RNA (ngRNA). Such ngRNA can comprise a spacer comprising nucleotides 5-20 of SEQ ID NO: 2045, 2046, 2047, 2048, 2049, 2050, 2051, 2052, 2053, 2054, 2055, 2056, 2057, 2058, 2059, 2060, 2061, 2062, 2063, 2064, 2065, 2066, 2067, 2068, 2069, 2070, 2071, 2072, 2073, 2074, 2075, 2076, 2077, 2078, 2079, 2080, 2081, 2082, 2083, 2084, 2085, 2086, 2087, 2088, 2089, 2090, 2091, 2092, 2093, 2094, 2095, 2096, 2437, 2439, 2442, 2443, 2444, or 5536 and a gRNA core capable of binding to a Cas9 protein. The spacer of the ngRNA can comprise nucleotides 4-20, 3-20, 2-20, or 1-20 of SEQ ID NO: 2045, 2046, 2047, 2048, 2049, 2050, 2051, 2052, 2053, 2054, 2055, 2056, 2057, 2058, 2059, 2060, 2061, 2062, 2063, 2064, 2065, 2066, 2067, 2068, 2069, 2070, 2071, 2072, 2073, 2074, 2075, 2076, 2077, 2078, 2079, 2080, 2081, 2082, 2083, 2084, 2085, 2086, 2087, 2088, 2089, 2090, 2091, 2092, 2093, 2094, 2095, 2096, 2437, 2439, 2442, 2443, 2444, or 5536. The spacer of the ngRNA can comprise SEQ ID NO: 2045, 2046, 2047, 2048, 2049, 2050, 2051, 2052, 2053, 2054, 2055, 2056, 2057, 2058, 2059, 2060, 2061, 2062, 2063, 2064, 2065, 2066, 2067, 2068, 2069, 2070, 2071, 2072, 2073, 2074, 2075, 2076, 2077, 2078, 2079, 2080, 2081, 2082, 2083, 2084, 2085, 2086, 2087, 2088, 2089, 2090, 2091, 2092, 2093, 2094, 2095, 2096, 2437, 2439, 2442, 2443, 2444, or 5536. The gRNA core of the ngRNA can comprise SEQ ID NO. 5857-5859. Exemplary ngRNA provided in Table 28 can comprise SEQ ID NO: 2257, 2258, 2259, 2260, 2261, 2262, 2263, 2264, 2265, 2266, 2267, 2268, 2269, 2270, 2271, 2272, 2273, 2274, 2275, 2276, 2277, 2278, 2279, 2280, 2281, 2282, 2283, 2284, 2285, 2286, 2287, 2288, 2289, 4411, 4416, 4418, 4420, or 4422. Such ngRNA sequences may further comprise a 3′ motif at the 3′ end of the gRNA core, for example, a series of 3, 4 or more U nucleotides. Exemplary ngRNA sequences with such 3′ adaptations include SEQ ID NOs: 2290-2292. Without being bound by theory, such 3′ motifs are believed to increase ngRNA stability.

[0325] Table 29 provides Prime Editing guide RNAs (PEgRNAs), which can be used in Prime Editing systems disclosed herein. Such Prime Editing systems can comprise a Cas9 protein capable of recognizing an NNGG PAM sequence (e.g., GCGG), and a reverse transcriptase. The Prime Editing systems (e.g., PE3 or PE3b systems) can further comprise a nick guide RNA (ngRNA). Such PEgRNAs and Prime Editing systems can be used, for example, to correct an H1069Q mutation in ATP7B.

[0326] The PEgRNAs of Table 29 comprise: (a) a spacer comprising nucleotides 5-20 of SEQ ID NO: 5537, (b) a gRNA core capable of binding to a Cas9 protein, and (c) an extension arm comprising: (i) an editing template comprising any one of SEQ ID NOs: 5549-5554, and (ii) a primer binding site (PBS) comprising any one of SEQ ID NOs: 5538-5548. The spacer of the PEgRNA can comprise, for example, nucleotides 4-20, 3-20, 2-20, or 1-20 of SEQ ID NO: 5537. The spacer of the PEgRNA can comprise SEQ ID NO: 5537. The RTT and the PBS can comprise respectively SEQ ID NOs: 5549 and 5538, 5549 and 5539, 5549 and 5540, 5549 and 5541, 5549 and 5542, 5549 and 5543, 5549 and 5544, 5549 and 5545, 5549 and 5546, 5549 and 5547, 5549 and 5548, 5550 and 5538, 5550 and 5539, 5550 and 5540, 5550 and 5541, 5550 and 5542, 5550 and 5543, 5550 and 5544, 5550 and 5545, 5550 and 5546, 5550 and 5547, 5550 and 5548, 5551 and 5538, 5551 and 5539, 5551 and 5540, 5551 and 5541, 5551 and 5542, 5551 and 5543, 5551 and 5544, 5551 and 5545, 5551 and 5546, 5551 and 5547, 5551 and 5548, 5552 and 5538, 5552 and 5539, 5552 and 5540, 5552 and 5541, 5552 and 5542, 5552 and 5543, 5552 and 5544, 5552 and 5545, 5552 and 5546, 5552 and 5547, 5552 and 5548, 5553 and 5538, 5553 and 5539, 5553 and 5540, 5553 and 5541, 5553 and 5542, 5553 and 5543, 5553 and 5544, 5553 and 5545, 5553 and 5546, 5553 and 5547, 5553 and 5548, 5554 and 5538, 5554 and 5539, 5554 and 5540, 5554 and 5541, 5554 and 5542, 5554 and 5543, 5554 and 5544, 5554 and 5545, 5554 and 5546, 5554 and 5547, or 5554 and 5548. The gRNA core of the PEgRNA can comprise SEQ ID NO. 5857-5859. Such PEgRNA sequences may further comprise a 3′ motif at the 3′ end of the extension arm, for example, a hairpin-forming motif or a series of 3, 4 or more U nucleotides. Without being bound by theory, such 3′ motifs are believed to increase PEgRNA stability. Such PEgRNA sequences may alternatively or additionally be adapted for transcription from a DNA template, for example, by including a 5′ terminal G if the spacer of the PEgRNA begins with another nucleotide, by including 6 or 7 U nucleotides at the 3′ end of the extension arm, or both. Such plasmid adapted sequences may further comprise a hairpin-forming motif between the PBS and the 3′ terminal U series.

[0327] Any of the PEgRNAs of Table 29 can be used in a Prime Editing system further comprising a nick guide RNA (ngRNA). Such ngRNA can comprise a spacer comprising nucleotides 5-20 of SEQ ID NO: 27, 30, 33, 35, 50, 68, 70, 200, 201, 202, 204, 205, 206, 207, 208, 209, 337, 736, 740, or 5306 and a gRNA core capable of binding to a Cas9 protein. The spacer of the ngRNA can comprise nucleotides 4-20, 3-20, 2-20, or 1-20 of SEQ ID NO: 27, 30, 33, 35, 50, 68, 70, 200, 201, 202, 204, 205, 206, 207, 208, 209, 337, 736, 740, or 5306. The spacer of the ngRNA can comprise SEQ ID NO: 27, 30, 33, 35, 50, 68, 70, 200, 201, 202, 204, 205, 206, 207, 208, 209, 337, 736, 740, or 5306. The gRNA core of the ngRNA can comprise SEQ ID NO. 5857-5859. Exemplary ngRNA provided in Table 29 can comprise SEQ ID NO: 153, 154, 157, 160, 162, 163, 165, 166, 167, 170, 171, 172, 173, 177, 178, 180, 181, 291, 292, 1501, 1503, or 1504. Such ngRNA sequences may further comprise a 3′ motif at the 3′ end of the gRNA core, for example, a series of 3, 4 or more U nucleotides. Without being bound by theory, such 3′ motifs are believed to increase ngRNA stability.

[0328] Table 30 provides Prime Editing guide RNAs (PEgRNAs), which can be used in Prime Editing systems disclosed herein. Such Prime Editing systems can comprise a Cas9 protein capable of recognizing an NGG or NG PAM sequence (e.g., TGG or TG), and a reverse transcriptase. The Prime Editing systems (e.g., PE3 or PE3b systems) can further comprise a nick guide RNA (ngRNA). Such PEgRNAs and Prime Editing systems can be used, for example, to correct an H1069Q mutation in ATP7B.

[0329] The PEgRNAs of Table 30 comprise: (a) a spacer comprising nucleotides 5-20 of SEQ ID NO: 5555, (b) a gRNA core capable of binding to a Cas9 protein, and (c) an extension arm comprising: (i) an editing template comprising any one of SEQ ID NOs: 5567-5590, and (ii) a primer binding site (PBS) comprising any one of SEQ ID NOs: 5556-5566. The spacer of the PEgRNA can comprise, for example, nucleotides 4-20, 3-20, 2-20, or 1-20 of SEQ ID NO: 5555. The spacer of the PEgRNA can comprise SEQ ID NO: 5555. The RTT and the PBS can comprise respectively SEQ ID NOs: 5567 and 5556, 5567 and 5557, 5567 and 5558, 5567 and 5559, 5567 and 5560, 5567 and 5561, 5567 and 5562, 5567 and 5563, 5567 and 5564, 5567 and 5565, 5567 and 5566, 5568 and 5556, 5568 and 5557, 5568 and 5558, 5568 and 5559, 5568 and 5560, 5568 and 5561, 5568 and 5562, 5568 and 5563, 5568 and 5564, 5568 and 5565, 5568 and 5566, 5569 and 5556, 5569 and 5557, 5569 and 5558, 5569 and 5559, 5569 and 5560, 5569 and 5561, 5569 and 5562, 5569 and 5563, 5569 and 5564, 5569 and 5565, 5569 and 5566, 5570 and 5556, 5570 and 5557, 5570 and 5558, 5570 and 5559, 5570 and 5560, 5570 and 5561, 5570 and 5562, 5570 and 5563, 5570 and 5564, 5570 and 5565, 5570 and 5566, 5571 and 5556, 5571 and 5557, 5571 and 5558, 5571 and 5559, 5571 and 5560, 5571 and 5561, 5571 and 5562, 5571 and 5563, 5571 and 5564, 5571 and 5565, 5571 and 5566, 5572 and 5556, 5572 and 5557, 5572 and 5558, 5572 and 5559, 5572 and 5560, 5572 and 5561, 5572 and 5562, 5572 and 5563, 5572 and 5564, 5572 and 5565, 5572 and 5566, 5573 and 5556, 5573 and 5557, 5573 and 5558, 5573 and 5559, 5573 and 5560, 5573 and 5561, 5573 and 5562, 5573 and 5563, 5573 and 5564, 5573 and 5565, 5573 and 5566, 5574 and 5556, 5574 and 5557, 5574 and 5558, 5574 and 5559, 5574 and 5560, 5574 and 5561, 5574 and 5562, 5574 and 5563, 5574 and 5564, 5574 and 5565, 5574 and 5566, 5575 and 5556, 5575 and 5557, 5575 and 5558, 5575 and 5559, 5575 and 5560, 5575 and 5561, 5575 and 5562, 5575 and 5563, 5575 and 5564, 5575 and 5565, 5575 and 5566, 5576 and 5556, 5576 and 5557, 5576 and 5558, 5576 and 5559, 5576 and 5560, 5576 and 5561, 5576 and 5562, 5576 and 5563, 5576 and 5564, 5576 and 5565, 5576 and 5566, 5577 and 5556, 5577 and 5557, 5577 and 5558, 5577 and 5559, 5577 and 5560, 5577 and 5561, 5577 and 5562, 5577 and 5563, 5577 and 5564, 5577 and 5565, 5577 and 5566, 5578 and 5556, 5578 and 5557, 5578 and 5558, 5578 and 5559, 5578 and 5560, 5578 and 5561, 5578 and 5562, 5578 and 5563, 5578 and 5564, 5578 and 5565, 5578 and 5566, 5579 and 5556, 5579 and 5557, 5579 and 5558, 5579 and 5559, 5579 and 5560, 5579 and 5561, 5579 and 5562, 5579 and 5563, 5579 and 5564, 5579 and 5565, 5579 and 5566, 5580 and 5556, 5580 and 5557, 5580 and 5558, 5580 and 5559, 5580 and 5560, 5580 and 5561, 5580 and 5562, 5580 and 5563, 5580 and 5564, 5580 and 5565, 5580 and 5566, 5581 and 5556, 5581 and 5557, 5581 and 5558, 5581 and 5559, 5581 and 5560, 5581 and 5561, 5581 and 5562, 5581 and 5563, 5581 and 5564, 5581 and 5565, 5581 and 5566, 5582 and 5556, 5582 and 5557, 5582 and 5558, 5582 and 5559, 5582 and 5560, 5582 and 5561, 5582 and 5562, 5582 and 5563, 5582 and 5564, 5582 and 5565, 5582 and 5566, 5583 and 5556, 5583 and 5557, 5583 and 5558, 5583 and 5559, 5583 and 5560, 5583 and 5561, 5583 and 5562, 5583 and 5563, 5583 and 5564, 5583 and 5565, 5583 and 5566, 5584 and 5556, 5584 and 5557, 5584 and 5558, 5584 and 5559, 5584 and 5560, 5584 and 5561, 5584 and 5562, 5584 and 5563, 5584 and 5564, 5584 and 5565, 5584 and 5566, 5585 and 5556, 5585 and 5557, 5585 and 5558, 5585 and 5559, 5585 and 5560, 5585 and 5561, 5585 and 5562, 5585 and 5563, 5585 and 5564, 5585 and 5565, 5585 and 5566, 5586 and 5556, 5586 and 5557, 5586 and 5558, 5586 and 5559, 5586 and 5560, 5586 and 5561, 5586 and 5562, 5586 and 5563, 5586 and 5564, 5586 and 5565, 5586 and 5566, 5587 and 5556, 5587 and 5557, 5587 and 5558, 5587 and 5559, 5587 and 5560, 5587 and 5561, 5587 and 5562, 5587 and 5563, 5587 and 5564, 5587 and 5565, 5587 and 5566, 5588 and 5556, 5588 and 5557, 5588 and 5558, 5588 and 5559, 5588 and 5560, 5588 and 5561, 5588 and 5562, 5588 and 5563, 5588 and 5564, 5588 and 5565, 5588 and 5566, 5589 and 5556, 5589 and 5557, 5589 and 5558, 5589 and 5559, 5589 and 5560, 5589 and 5561, 5589 and 5562, 5589 and 5563, 5589 and 5564, 5589 and 5565, 5589 and 5566, 5590 and 5556, 5590 and 5557, 5590 and 5558, 5590 and 5559, 5590 and 5560, 5590 and 5561, 5590 and 5562, 5590 and 5563, 5590 and 5564, 5590 and 5565, or 5590 and 5566. The gRNA core of the PEgRNA can comprise SEQ ID NO. 5857-5859. Exemplary PEgRNAs provided in Table 30 can comprise and one of SEQ ID NOs. 5591-5637. Such PEgRNA sequences may further comprise a 3 motif at the 3 end of the extension arm, for example, a hairpin-forming motif or a series of 3, 4 or more U nucleotides. Without being bound by theory, such 3′ motifs are believed to increase PEgRNA stability. Such PEgRNA sequences may alternatively or additionally be adapted for transcription from a DNA template, for example, by including a 5′ terminal G if the spacer of the PEgRNA begins with another nucleotide, by including 6 or 7 U nucleotides at the 3′ end of the extension arm, or both. Such plasmid adapted sequences may further comprise a hairpin-forming motif between the PBS and the 3′ terminal U series.

[0330] Any of the PEgRNAs of Table 30 can be used in a Prime Editing system further comprising a nick guide RNA (ngRNA). Such ngRNA can comprise a spacer comprising nucleotides 5-20 of SEQ ID NO: 41, 60, 61, 62, 63, 64, 65, 66, 69, or 71 and a gRNA core capable of binding to a Cas9 protein. The spacer of the ngRNA can comprise nucleotides 4-20, 3-20, 2-20, or 1-20 of SEQ ID NO: 41, 60, 61, 62, 63, 64, 65, 66, 69, or 71. The spacer of the ngRNA can comprise SEQ ID NO: 41, 60, 61, 62, 63, 64, 65, 66, 69, or 71. The gRNA core of the ngRNA can comprise SEQ ID NO. 5857-5859. Such ngRNA sequences may further comprise a 3′ motif at the 3′ end of the gRNA core, for example, a series of 3, 4 or more U nucleotides. Without being bound by theory, such 3′ motifs are believed to increase ngRNA stability.

[0331] Table 31 provides Prime Editing guide RNAs (PEgRNAs), which can be used in Prime Editing systems disclosed herein. Such Prime Editing systems can comprise a Cas9 protein capable of recognizing an NGG or NG PAM sequence (e.g., AGG or AG), and a reverse transcriptase. The Prime Editing systems (e.g., PE3 or PE3b systems) can further comprise a nick guide RNA (ngRNA). Such PEgRNAs and Prime Editing systems can be used, for example, to correct an H1069Q mutation in ATP7B.

[0332] The PEgRNAs of Table 31 comprise: (a) a spacer comprising nucleotides 5-20 of SEQ ID NO: 5638, (b) a gRNA core capable of binding to a Cas9 protein, and (c) an extension arm comprising: (i) an editing template comprising any one of SEQ ID NOs: 5650-5668, and (ii) a primer binding site (PBS) comprising any one of SEQ ID NOs: 5639-5649. The spacer of the PEgRNA can comprise, for example, nucleotides 4-20, 3-20, 2-20, or 1-20 of SEQ ID NO: 5638. The spacer of the PEgRNA can comprise SEQ ID NO: 5638. The RTT and the PBS can comprise respectively SEQ ID NOs: 5650 and 5639, 5650 and 5640, 5650 and 5641, 5650 and 5642, 5650 and 5643, 5650 and 5644, 5650 and 5645, 5650 and 5646, 5650 and 5647, 5650 and 5648, 5650 and 5649, 5651 and 5639, 5651 and 5640, 5651 and 5641, 5651 and 5642, 5651 and 5643, 5651 and 5644, 5651 and 5645, 5651 and 5646, 5651 and 5647, 5651 and 5648, 5651 and 5649, 5652 and 5639, 5652 and 5640, 5652 and 5641, 5652 and 5642, 5652 and 5643, 5652 and 5644, 5652 and 5645, 5652 and 5646, 5652 and 5647, 5652 and 5648, 5652 and 5649, 5653 and 5639, 5653 and 5640, 5653 and 5641, 5653 and 5642, 5653 and 5643, 5653 and 5644, 5653 and 5645, 5653 and 5646, 5653 and 5647, 5653 and 5648, 5653 and 5649, 5654 and 5639, 5654 and 5640, 5654 and 5641, 5654 and 5642, 5654 and 5643, 5654 and 5644, 5654 and 5645, 5654 and 5646, 5654 and 5647, 5654 and 5648, 5654 and 5649, 5655 and 5639, 5655 and 5640, 5655 and 5641, 5655 and 5642, 5655 and 5643, 5655 and 5644, 5655 and 5645, 5655 and 5646, 5655 and 5647, 5655 and 5648, 5655 and 5649, 5656 and 5639, 5656 and 5640, 5656 and 5641, 5656 and 5642, 5656 and 5643, 5656 and 5644, 5656 and 5645, 5656 and 5646, 5656 and 5647, 5656 and 5648, 5656 and 5649, 5657 and 5639, 5657 and 5640, 5657 and 5641, 5657 and 5642, 5657 and 5643, 5657 and 5644, 5657 and 5645, 5657 and 5646, 5657 and 5647, 5657 and 5648, 5657 and 5649, 5658 and 5639, 5658 and 5640, 5658 and 5641, 5658 and 5642, 5658 and 5643, 5658 and 5644, 5658 and 5645, 5658 and 5646, 5658 and 5647, 5658 and 5648, 5658 and 5649, 5659 and 5639, 5659 and 5640, 5659 and 5641, 5659 and 5642, 5659 and 5643, 5659 and 5644, 5659 and 5645, 5659 and 5646, 5659 and 5647, 5659 and 5648, 5659 and 5649, 5660 and 5639, 5660 and 5640, 5660 and 5641, 5660 and 5642, 5660 and 5643, 5660 and 5644, 5660 and 5645, 5660 and 5646, 5660 and 5647, 5660 and 5648, 5660 and 5649, 5661 and 5639, 5661 and 5640, 5661 and 5641, 5661 and 5642, 5661 and 5643, 5661 and 5644, 5661 and 5645, 5661 and 5646, 5661 and 5647, 5661 and 5648, 5661 and 5649, 5662 and 5639, 5662 and 5640, 5662 and 5641, 5662 and 5642, 5662 and 5643, 5662 and 5644, 5662 and 5645, 5662 and 5646, 5662 and 5647, 5662 and 5648, 5662 and 5649, 5663 and 5639, 5663 and 5640, 5663 and 5641, 5663 and 5642, 5663 and 5643, 5663 and 5644, 5663 and 5645, 5663 and 5646, 5663 and 5647, 5663 and 5648, 5663 and 5649, 5664 and 5639, 5664 and 5640, 5664 and 5641, 5664 and 5642, 5664 and 5643, 5664 and 5644, 5664 and 5645, 5664 and 5646, 5664 and 5647, 5664 and 5648, 5664 and 5649, 5665 and 5639, 5665 and 5640, 5665 and 5641, 5665 and 5642, 5665 and 5643, 5665 and 5644, 5665 and 5645, 5665 and 5646, 5665 and 5647, 5665 and 5648, 5665 and 5649, 5666 and 5639, 5666 and 5640, 5666 and 5641, 5666 and 5642, 5666 and 5643, 5666 and 5644, 5666 and 5645, 5666 and 5646, 5666 and 5647, 5666 and 5648, 5666 and 5649, 5667 and 5639, 5667 and 5640, 5667 and 5641, 5667 and 5642, 5667 and 5643, 5667 and 5644, 5667 and 5645, 5667 and 5646, 5667 and 5647, 5667 and 5648, 5667 and 5649, 5668 and 5639, 5668 and 5640, 5668 and 5641, 5668 and 5642, 5668 and 5643, 5668 and 5644, 5668 and 5645, 5668 and 5646, 5668 and 5647, 5668 and 5648, or 5668 and 5649. The gRNA core of the PEgRNA can comprise SEQ ID NO. 5857-5859. Exemplary PEgRNAs provided in Table 31 can comprise any one of SEQ ID NOs. 5669-5705. Such PEgRNA sequences may further comprise a 3′ motif at the 3′ end of the extension arm, for example, a hairpin-forming motif or a series of 3, 4 or more U nucleotides. Without being bound by theory, such 3′ motifs are believed to increase PEgRNA stability. Such PEgRNA sequences may alternatively or additionally be adapted for transcription from a DNA template, for example, by including a 5′ terminal G if the spacer of the PEgRNA begins with another nucleotide, by including 6 or 7 U nucleotides at the 3′ end of the extension arm, or both. Exemplary transcription-adapted sequences include None. Such plasmid adapted sequences may further comprise a hairpin-forming motif between the PBS and the 3′ terminal U series.

[0333] Any of the PEgRNAs of Table 31 can be used in a Prime Editing system further comprising a nick guide RNA (ngRNA). Such ngRNA can comprise a spacer comprising nucleotides 5-20 of SEQ ID NO: 41, 60, 61, 62, 63, 64, 65, 66, 69, or 71 and a gRNA core capable of binding to a Cas9 protein. The spacer of the ngRNA can comprise nucleotides 4-20, 3-20, 2-20, or 1-20 of SEQ ID NO: 41, 60, 61, 62, 63, 64, 65, 66, 69, or 71. The spacer of the ngRNA can comprise SEQ ID NO: 41, 60, 61, 62, 63, 64, 65, 66, 69, or 71. The gRNA core of the ngRNA can comprise SEQ ID NO. 5857-5859. Such ngRNA sequences may further comprise a 3′ motif at the 3′ end of the gRNA core, for example, a series of 3, 4 or more U nucleotides. Without being bound by theory, such 3′ motifs are believed to increase ngRNA stability.

[0334] Table 32 provides Prime Editing guide RNAs (PEgRNAs), which can be used in Prime Editing systems disclosed herein. Such Prime Editing systems can comprise a Cas9 protein capable of recognizing an NGG or NG PAM sequence (e.g., AGG or AG), and a reverse transcriptase. The Prime Editing systems (e.g., PE3 or PE3b systems) can further comprise a nick guide RNA (ngRNA). Such PEgRNAs and Prime Editing systems can be used, for example, to correct an H1069Q mutation in ATP7B.

[0335] The PEgRNAs of Table 32 comprise: (a) a spacer comprising nucleotides 5-20 of SEQ ID NO: 5706. (b) a gRNA core capable of binding to a Cas9 protein, and (c) an extension arm comprising: (i) an editing template comprising any one of SEQ ID NOs: 5718-5738, and (ii) a primer binding site (PBS) comprising any one of SEQ ID NOs: 5707-5717. The spacer of the PEgRNA can comprise, for example, nucleotides 4-20, 3-20, 2-20, or 1-20 of SEQ ID NO: 5706. The spacer of the PEgRNA can comprise SEQ ID NO: 5706. The RTT and the PBS can comprise respectively SEQ ID NOs: 5718 and 5707, 5718 and 5708, 5718 and 5709, 5718 and 5710, 5718 and 5711, 5718 and 5712, 5718 and 5713, 5718 and 5714, 5718 and 5715, 5718 and 5716, 5718 and 5717, 5719 and 5707, 5719 and 5708, 5719 and 5709, 5719 and 5710, 5719 and 5711, 5719 and 5712, 5719 and 5713, 5719 and 5714, 5719 and 5715, 5719 and 5716, 5719 and 5717, 5720 and 5707, 5720 and 5708, 5720 and 5709, 5720 and 5710, 5720 and 5711, 5720 and 5712, 5720 and 5713, 5720 and 5714, 5720 and 5715, 5720 and 5716, 5720 and 5717, 5721 and 5707, 5721 and 5708, 5721 and 5709, 5721 and 5710, 5721 and 5711, 5721 and 5712, 5721 and 5713, 5721 and 5714, 5721 and 5715, 5721 and 5716, 5721 and 5717, 5722 and 5707, 5722 and 5708, 5722 and 5709, 5722 and 5710, 5722 and 5711, 5722 and 5712, 5722 and 5713, 5722 and 5714, 5722 and 5715, 5722 and 5716, 5722 and 5717, 5723 and 5707, 5723 and 5708, 5723 and 5709, 5723 and 5710, 5723 and 5711, 5723 and 5712, 5723 and 5713, 5723 and 5714, 5723 and 5715, 5723 and 5716, 5723 and 5717, 5724 and 5707, 5724 and 5708, 5724 and 5709, 5724 and 5710, 5724 and 5711, 5724 and 5712, 5724 and 5713, 5724 and 5714, 5724 and 5715, 5724 and 5716, 5724 and 5717, 5725 and 5707, 5725 and 5708, 5725 and 5709, 5725 and 5710, 5725 and 5711, 5725 and 5712, 5725 and 5713, 5725 and 5714, 5725 and 5715, 5725 and 5716, 5725 and 5717, 5726 and 5707, 5726 and 5708, 5726 and 5709, 5726 and 5710, 5726 and 5711, 5726 and 5712, 5726 and 5713, 5726 and 5714, 5726 and 57151, 5726 and 5716, 5726 and 5717, 5727 and 5707, 5727 and 5708, 5727 and 5709, 5727 and 5710, 5727 and 5711, 5727 and 5712, 5727 and 5713, 5727 and 5714, 5727 and 5715, 5727 and 5716, 5727 and 5717, 5728 and 5707, 5728 and 5708, 5728 and 5709, 5728 and 5710, 5728 and 5711, 5728 and 5712, 5728 and 5713, 5728 and 5714, 5728 and 5715, 5728 and 5716, 5728 and 5717, 5729 and 5707, 5729 and 5708, 5729 and 5709, 5729 and 5710, 5729 and 5711, 5729 and 5712, 5729 and 5713, 5729 and 57141, 5729 and 5715, 5729 and 5716, 5729 and 5717, 5730 and 5707, 5730 and 5708, 5730 and 5709, 5730 and 5710, 5730 and 5711, 5730 and 5712, 5730 and 5713, 5730 and 5714, 5730 and 5715, 5730 and 5716, 5730 and 5717, 5731 and 5707, 5731 and 5708, 5731 and 5709, 5731 and 5710, 5731 and 5711, 5731 and 5712, 5731 and 5713, 5731 and 5714, 5731 and 5715, 5731 and 5716, 5731 and 5717, 5732 and 5707, 5732 and 5708, 5732 and 5709, 5732 and 5710, 5732 and 5711, 5732 and 5712, 5732 and 5713, 5732 and 5714, 5732 and 5715, 5732 and 5716, 5732 and 5717, 5733 and 5707, 5733 and 5708, 5733 and 5709, 5733 and 5710, 5733 and 5711, 5733 and 5712, 5733 and 5713, 5733 and 5714, 5733 and 5715, 5733 and 5716, 5733 and 5717, 5734 and 5707, 5734 and 5708, 5734 and 5709, 5734 and 5710, 5734 and 5711, 5734 and 5712, 5734 and 5713, 5734 and 5714, 5734 and 5715, 5734 and 5716, 5734 and 5717, 5735 and 5707, 5735 and 5708, 5735 and 5709, 5735 and 5710, 5735 and 5711, 5735 and 5712, 5735 and 5713, 5735 and 5714, 5735 and 5715, 5735 and 5716, 5735 and 5717, 5736 and 5707, 5736 and 5708, 5736 and 5709, 5736 and 5710, 5736 and 5711, 5736 and 5712, 5736 and 5713, 5736 and 5714, 5736 and 5715, 5736 and 5716, 5736 and 5717, 5737 and 5707, 5737 and 5708, 5737 and 5709, 5737 and 5710, 5737 and 5711, 5737 and 5712, 5737 and 5713, 5737 and 5714, 5737 and 5715, 5737 and 5716, 5737 and 5717, 5738 and 5707, 5738 and 5708, 5738 and 5709, 5738 and 5710, 5738 and 5711, 5738 and 5712, 5738 and 5713, 5738 and 5714, 5738 and 5715, 5738 and 5716, or 5738 and 5717. The gRNA core of the PEgRNA can comprise SEQ ID NO. 5857-5859. Exemplary PEgRNAs provided in Table 32 can comprise any one of SEQ ID NOs. 5739-5779. Such PEgRNA sequences may further comprise a 3′ motif at the 3′ end of the extension arm, for example, a hairpin-forming motif or a series of 3, 4 or more U nucleotides. Without being bound by theory, such 3′ motifs are believed to increase PEgRNA stability. Such PEgRNA sequences may alternatively or additionally be adapted for transcription from a DNA template, for example, by including a 5′ terminal G if the spacer of the PEgRNA begins with another nucleotide, by including 6 or 7 U nucleotides at the 3′ end of the extension arm, or both. Such plasmid adapted sequences may further comprise a hairpin-forming motif between the PBS and the 3′ terminal U series.

[0336] Any of the PEgRNAs of Table 32 can be used in a Prime Editing system further comprising a nick guide RNA (ngRNA). Such ngRNA can comprise a spacer comprising nucleotides 5-20 of SEQ ID NO: 41, 60, 61, 62, 63, 64, 65, 66, 69, or 71 and a gRNA core capable of binding to a Cas9 protein. The spacer of the ngRNA can comprise nucleotides 4-20, 3-20, 2-20, or 1-20 of SEQ ID NO: 41, 60, 61, 62, 63, 64, 65, 66, 69, or 71. The spacer of the ngRNA can comprise SEQ ID NO: 41, 60, 61, 62, 63, 64, 65, 66, 69, or 71. The gRNA core of the ngRNA can comprise SEQ ID NO. 5857-5859. Such ngRNA sequences may further comprise a 3′ motif at the 3′ end of the gRNA core, for example, a series of 3, 4 or more U nucleotides. Without being bound by theory, such 3′ motifs are believed to increase ngRNA stability.

[0337] Table 33 provides Prime Editing guide RNAs (PEgRNAs) and nick guide RNAs (ngRNAs) that can be used in Prime Editing systems disclosed herein. Any of the PEgRNAs of Table 33 can be used in a Prime Editing system further comprising any ngRNA of Table 33.

TABLE 33
exemplary PEgRNA and ngRNA sequences.

| SEQ | | |
|---|---|---|
| ID | DESCRIP- | |
| NO. | TION | SEQUENCE |
| 2739 | PEgRNA | UUUGGUGACUGCCACGCCCAGUUUUAGAGCUAGAAA |
| | | UAGCAAGUUAAAAUAAGGCUAGUCCGUUAUCAACUU |
| | | GAAAAAGUGGCACCGAGUCGGUGCAGUGAACAcCCCU |
| | | UGGGCGUGGCAuuuu |
| 3277 | PEgRNA | UUUGGUGACUGCCACGCCCAGUUUUAGAGCUAGAAA |
| | | UAGCAAGUUAAAAUAAGGCUAGUCCGUUAUCAACUU |
| | | GAAAAAGUGGCACCGAGUCGGUGCAGUGAACAcCCgU |
| | | UGGGCGUGGCAGUCACCAAuuuu |
| 3276 | PEgRNA | UUUGGUGACUGCCACGCCCAGUUUUAGAGCUAGAAA |
| | | UAGCAAGUUAAAAUAAGGCUAGUCCGUUAUCAACUU |
| | | GAAAAAGUGGCACCGAGUCGGUGCAGUGAACAcCCCU |
| | | UGGGCGUGGCAGUCACCAAuuuu |
| 2785 | PERNA | UUUGGUGACUGCCACGCCCAGUUUUAGAGCUAGAAA |
| | | UAGCAAGUUAAAAUAAGGCUAGUCCGUUAUCAACUU |
| | | GAAAAAGUGGCACCGAGUCGGUGCGAACAcCCCUUGG |
| | | GCGUGGCAGUCAuuuu |
| 4695 | PEgRNA | UUGGUGACUGCCACGCCCAAGUUUUAGAGCUAGAAA |
| | | UAGCAAGUUAAAAUAAGGCUAGUCCGUUAUCAACUU |
| | | GAAAAAGUGGCACCGAGUCGGUGCGUGAACAcCCCUU |
| | | GGGCGUGGCAGUCuuuu |
| 4762 | PERNA | UUGGUGACUGCCACGCCCAAGUUUUAGAGCUAGAAA |
| | | UAGCAAGUUAAAAUAAGGCUAGUCCGUUAUCAACUU |
| | | GAAAAAGUGGCACCGAGUCGGUGCAGUGAACAcCCCU |
| | | UGGGCGUGGCAGUCAuuuu |
| 4824 | PEgRNA | UUGGUGACUGCCACGCCCAAGUUUUAGAGCUAGAAA |
| | | UAGCAAGUUAAAAUAAGGCUAGUCCGUUAUCAACUU |
| | | GAAAAAGUGGCACCGAGUCGGUGCGCAGUGAACAcCC |
| | | CUUGGGCGUGGCAGUCAuuuu |
| 4721 | PEgRNA | UUGGUGACUGCCACGCCCAAGUUUUAGAGCUAGAAA |
| | | UAGCAAGUUAAAAUAAGGCUAGUCCGUUAUCAACUU |
| | | GAAAAAGUGGCACCGAGUCGGUGCAGUGAACAcCCCU |
| | | UGGGCGUGGCAGUuuuu |
| 4743 | PEgRNA | UUGGUGACUGCCACGCCCAAGUUUUAGAGCUAGAAA |
| | | UAGCAAGUUAAAAUAAGGCUAGUCCGUUAUCAACUU |
| | | GAAAAAGUGGCACCGAGUCGGUGCAGUGAACAcCCCU |
| | | UGGGCGUGGCAGUCuuuu |
| 4536 | PEgRNA | UUGGUGACUGCCACGCCCAAGUUUUAGAGCUAGAAA |
| | | UAGCAAGUUAAAAUAAGGCUAGUCCGUUAUCAACUU |
| | | GAAAAAGUGGCACCGAGUCGGUGCAACAcCCCUUGGG |
| | | CGUGGCuuuu |
| 4741 | PEgRNA | UUGGUGACUGCCACGCCCAAGUUUUAGAGCUAGAAA |
| | | UAGCAAGUUAAAAUAAGGCUAGUCCGUUAUCAACUU |
| | | GAAAAAGUGGCACCGAGUCGGUGCUGAACAcCCCUUG |
| | | GGCGUGGCAGUCACuuuu |
| 4788 | PEgRNA | UUGGUGACUGCCACGCCCAAGUUUUAGAGCUAGAAA |
| | | UAGCAAGUUAAAAUAAGGCUAGUCCGUUAUCAACUU |
| | | GAAAAAGUGGCACCGAGUCGGUGCAGCAGUGAACAcC |
| | | CCUUGGGCGUGGCAGuuuu |
| 4613 | PEgRNA | UUGGUGACUGCCACGCCCAAGUUUUAGAGCUAGAAA |
| | | UAGCAAGUUAAAAUAAGGCUAGUCCGUUAUCAACUU |
| | | GAAAAAGUGGCACCGAGUCGGUGCUGAACAcCCCUUG |
| | | GGCGUGGCAGuuuu |
| 2291 | ngRNA | GCCAGCAGUGAACAcCCCUUGUUUUAGAGCUAGAAAU |
| | | AGCAAGUUAAAAUAAGGCUAGUCCGUUAUCAACUUG |
| | | AAAAAGUGGCACCGAGUCGGUGCuuuu |
| 2292 | ngRNA | GGCCAGCAGUGAACAcCCCUGUUUUAGAGCUAGAAAU |
| | | AGCAAGUUAAAAUAAGGCUAGUCCGUUAUCAACUUG |
| | | AAAAAGUGGCACCGAGUCGGUGCuuuu |
| 4423 | ngRNA | GCCAGCAGUGAACAcCCGUUGUUUUAGAGCUAGAAA |
| | | UAGCAAGUUAAAAUAAGGCUAGUCCGUUAUCAACUU |
| | | GAAAAAGUGGCACCGAGUCGGUGCuuuu |
| 4424 | ngRNA | GGCCAGCAGUGAACAcCCGUGUUUUAGAGCUAGAAA |
| | | UAGCAAGUUAAAAUAAGGCUAGUCCGUUAUCAACUU |
| | | GAAAAAGUGGCACCGAGUCGGUGCuuuu |
| 2290 | ngRNA | CAUGCGGGUGCUCCUGCUGGGUUUUAGAGCUAGAAA |
| | | UAGCAAGUUAAAAUAAGGCUAGUCCGUUAUCAACUU |
| | | GAAAAAGUGGCACCGAGUCGGUGCuuuu |

[0338] A PEgRNA and/or an ngRNA of this disclosure, in some embodiments, may include modified nucleotides, e.g., chemically modified DNA or RNA nucleobases, and may include one or more nucleobase analogs (e.g., modifications which might add functionality, such as temperature resilience). In some embodiments, PEgRNAs and/or ngRNAs as described herein may be chemically modified. The phrase “chemical modifications,” as used herein, can include modifications which introduce chemistries which differ from those seen in naturally occurring DNA or RNAs, for example, covalent modifications such as the introduction of modified nucleotides, (e.g., nucleotide analogs, or the inclusion of pendant groups which are not naturally found in DNA or RNA molecules).

[0339] In some embodiments, the PEgRNAs and/or ngRNAs provided in this disclosure may have undergone a chemical or biological modifications. Modifications may be made at any position within a PEgRNA or ngRNA, and may include modification to a nucleobase or to a phosphate backbone of the PEgRNA or ngRNA. In some embodiments, chemical modifications can be a structure guided modifications. In some embodiments, a chemical modification is at the 5′ end and/or the 3′ end of a PEgRNA. In some embodiments, a chemical modification is at the 5′ end and/or the 3′ end of a ngRNA. In some embodiments, a chemical modification may be within the spacer sequence, the extension arm, the editing template sequence, or the primer binding site of a PEgRNA. In some embodiments, a chemical modification may be within the spacer sequence or the gRNA core of a PEgRNA or a ngRNA. In some embodiments, a chemical modification may be within the 3′ most nucleotides of a PEgRNA or ngRNA. In some embodiments, a chemical modification may be within the 3′ most end of a PEgRNA or ngRNA. In some embodiments, a chemical modification may be within the 5′ most end of a PEgRNA or ngRNA. In some embodiments, a PEgRNA or ngRNA comprises 1, 2, 3, 4, 5, 6, 7, 8, 9, 10 or more chemically modified nucleotides at the 3′ end. In some embodiments, a PEgRNA or ngRNA comprises 1, 2, 3, 4, 5, 6, 7, 8, 9, 10 or more chemically modified nucleotides at the 5′ end. In some embodiments, a PEgRNA or ngRNA comprises 1, 2, 3, 4, or 5 or more chemically modified nucleotides at the 3′ end. In some embodiments, a PEgRNA or ngRNA comprises 1, 2, 3, 4, or 5 more chemically modified nucleotides at the 5′ end. In some embodiments, a PEgRNA or ngRNA comprises 1, 2, or 3 or more chemically modified nucleotides at the 3′ end. In some embodiments, a PEgRNA or ngRNA comprises 1, 2, or 3 more chemically modified nucleotides at the 5′ end. In some embodiments, a PEgRNA or ngRNA comprises 1, 2, 3, 4, 5, 6, 7, 8, 9, 10 or more contiguous chemically modified nucleotides at the 3′ end. In some embodiments, a PEgRNA or ngRNA comprises 1, 2, 3, 4, 5, 6, 7, 8, 9, 10 or more contiguous chemically modified nucleotides at the 5′ end. In some embodiments, a PEgRNA or ngRNA comprises 1, 2, 3, 4, or 5 contiguous chemically modified nucleotides at the 3′ end. In some embodiments, a PEgRNA or ngRNA comprises 1, 2, 3, 4, or 5 contiguous chemically modified nucleotides at the 5′ end. In some embodiments, a PEgRNA or ngRNA comprises 1, 2, or 3 contiguous chemically modified nucleotides at the 3′ end. In some embodiments, a PEgRNA or ngRNA comprises 1, 2, or 3 contiguous chemically modified nucleotides at the 5′ end. In some embodiments, a PEgRNA or ngRNA comprises 3 contiguous chemically modified nucleotides at the 3′ end. In some embodiments, a PEgRNA or ngRNA comprises 1, 2, 3, 4, 5, or more chemically modified nucleotides near the 3′ end. In some embodiments, a PEgRNA or ngRNA comprises 3 contiguous chemically modified nucleotides at the 3′ end. In some embodiments, a PEgRNA or ngRNA comprises 3 contiguous chemically modified nucleotides at the 5′ end. In some embodiments, a PEgRNA or ngRNA comprises 1, 2, 3, 4, 5, or more chemically modified nucleotides near the 3′ end. In some embodiments, a PEgRNA or ngRNA comprises 1, 2, 3, 4, 5, or more contiguous chemically modified nucleotides near the 3′ end. In some embodiments, a PEgRNA or ngRNA comprises 1, 2, 3, 4, 5, or more chemically modified nucleotides near the 3′ end, where the 3′ most nucleotide is not modified, and the 1, 2, 3, 4, 5, or more chemically modified nucleotides precede the 3′ most nucleotide in a 5′-to-3′ order. In some embodiments, a PEgRNA or ngRNA comprises 1, 2, 3, 4, 5, 6, 7, 8, 9, 10, 11, 12, 13, 14, 15, 16, 17, 18, 19, 20, 21, 22, 23, 24, 25, 26, 27, 28, 29, 30, 31, 32, 33, 34, 35 or more chemically modified nucleotides near the 3′ end, where the 3′ most nucleotide is not modified, and the 1, 2, 3, 4, 5, 6, 7, 8, 9, 10, 11, 12, 13, 14, 15, 16, 17, 18, 19, 20, 21, 22, 23, 24, 25, 26, 27, 28, 29, 30, 31, 32, 33, 34, 35 or more chemically modified nucleotides precede the 3′ most nucleotide in a 5′-to-3′ order.

[0340] In some embodiments, a PEgRNA or ngRNA comprises one or more chemical modified nucleotides in the gRNA core. As exemplified in FIG. 5, the gRNA core of a PEgRNA may comprise one or more regions of a base paired lower stein, a base paired upper stem, where the lower stein and tipper stem may be connected by a bulge comprising unpaired RNAs. The gRNA core may further comprise a nexus distal from the spacer sequence. In some embodiments, the gRNA core comprises one or more chemically modified nucleotides in the lower stem, upper stein, and/or the hairpin regions. In some embodiments, all of the nucleotides in the lower stem, upper stem, and/or the hairpin regions are chemically modified.

[0341] A chemical modification to a PEgRNA or ngRNA can comprise a 2′-O-thionocarbamate-protected nucleoside phosphoramidite, a 2′-O-methyl (M), a 2′-O-methyl 3′ phosphorothioate (MS), or a 2′-O-methyl 3′ thioPACE (MSP), or any combination thereof. In some embodiments, a chemically modified PEgRNA and/or ngRNA can comprise a ′—O-methyl (M) RNA, a 2′-O-methyl 3′ phosphorothioate (MS) RNA, a 2′-O-methyl 3′ thioPACE (MSP) RNA, a 2′-F RNA, a phosphorothioate bond modification, any other chemical modifications known in the art, or any combination thereof. A chemical modification may also include, for example, the incorporation of non-nucleotide linkages or modified nucleotides into the PEgRNA and/or ngRNA (e.g., modifications to one or both of the 3′ and 5′ ends of a guide RNA molecule). Such modifications can include the addition of bases to an RNA sequence, complexing the RNA with an agent (e.g., a protein or a complementary nucleic acid molecule), and inclusion of elements which change the structure of an RNA molecule (e.g., which form secondary structures).

### Prime Editing Compositions

[0342] Disclosed herein, in some embodiments, are compositions, systems, and methods using a prime editing composition. The term “prime editing composition” or “prime editing system” refers to compositions involved in the method of prime editing as described herein. A prime editing composition may include a prime editor, e.g., a prime editor fusion protein, and a PEgRNA. A prime editing composition may further comprise additional elements, such as second strand nicking ngRNAs. Components of a prime editing composition may be combined to form a complex for prime editing, or may be kept separately, e.g., for administration purposes. In some embodiments, a prime editing composition comprises a prime editor fusion protein complexed with a PEgRNA and optionally complexed with a ngRNA. In some embodiments, the prime editing composition comprises a prime editor comprising a DNA binding domain and a DNA polymerase domain associated with each other through a PEgRNA. For example, the prime editing composition may comprise a prime editor comprising a DNA binding domain and a DNA polymerase domain linked to each other by an RNA-protein recruitment aptamer RNA sequence, which is linked to a PEgRNA. In some embodiments, a prime editing composition comprises a PEgRNA and a polynucleotide, a polynucleotide construct, or a vector that encodes a prime editor fusion protein. In some embodiments, a prime editing composition comprises a PEgRNA, a ngRNA, and a polynucleotide, a polynucleotide construct, or a vector that encodes a prime editor fusion protein. In some embodiments, a prime editing composition comprises multiple polynucleotides, polynucleotide constructs, or vectors, each of which encodes one or more prime editing composition components. In some embodiments, the PEgRNA of a prime editing composition is associated with the DNA binding domain, e.g., a Cas9 nickase, of the prime editor. In some embodiments, the PEgRNA of a prime editing composition complexes with the DNA binding domain of a prime editor and directs the prime editor to the target DNA.

[0343] In some embodiments, a prime editing composition comprises one or more polynucleotides that encode prime editor components and/or PEgRNA or ngRNAs. In some embodiments, a prime editing composition comprises a polynucleotide encoding a fusion protein comprising a DNA binding domain and a DNA polymerase domain. In some embodiments, a prime editing composition comprises (i) a polynucleotide encoding a fusion protein comprising a DNA binding domain and a DNA polymerase domain, and (ii) a PEgRNA or a polynucleotide encoding the PEgRNA. In some embodiments, a prime editing composition comprises (i) a polynucleotide encoding a fusion protein comprising a DNA binding domain and a DNA polymerase domain, (ii) a PEgRNA or a polynucleotide encoding the PEgRNA, and (iii) an ngRNA or a polynucleotide encoding the ngRNA. In some embodiments, a prime editing composition comprises (i) a polynucleotide encoding a DNA binding domain of a prime editor, e.g., a Cas9 nickase, (ii) a polynucleotide encoding a DNA polymerase domain of a prime editor, e.g., a reverse transcriptase, and (iii) a PEgRNA or a polynucleotide encoding the PEgRNA. In some embodiments, a prime editing composition comprises (i) a polynucleotide encoding a DNA binding domain of a prime editor, e.g., a Cas9 nickase, (ii) a polynucleotide encoding a DNA polymerase domain of a prime editor, e.g., a reverse transcriptase, (iii) a PEgRNA or a polynucleotide encoding the PEgRNA, and (iv) an ngRNA or a polynucleotide encoding the ngRNA. In some embodiments, the polynucleotide encoding the DNA biding domain or the polynucleotide encoding the DNA polymerase domain further encodes an additional polypeptide domain, e.g., an RNA-protein recruitment domain, such as a MS2 coat protein domain. In some embodiments, a prime editing composition comprises (i) a polynucleotide encoding a N-terminal half of a prime editor fusion protein and an intein-N and (ii) a polynucleotide encoding a C-terminal half of a prime editor fusion protein and an intein-C. In some embodiments, a prime editing composition comprises (i) a polynucleotide encoding a N-terminal half of a prime editor fusion protein and an intein-N (ii) a polynucleotide encoding a C-terminal half of a prime editor fusion protein and an intein-C, (iii) a PEgRNA or a polynucleotide encoding the PEgRNA, and/or (iv) an ngRNA or a polynucleotide encoding the ngRNA. In some embodiments, a prime editing composition comprises (i) a polynucleotide encoding a N-terminal portion of a DNA binding domain and an intein-N, (ii) a polynucleotide encoding a C-terminal portion of the DNA binding domain, an intein-C, and a DNA polymerase domain. In some embodiments, the DNA binding domain is a Cas protein domain, e.g., a Cas9 nickase. In some embodiments, the prime editing composition comprises (i) a polynucleotide encoding a N-terminal portion of a DNA binding domain and an intein-N, (ii) a polynucleotide encoding a C-terminal portion of the DNA binding domain, an intein-C, and a DNA polymerase domain, (iii) a PEgRNA or a polynucleotide encoding the PEgRNA, and/or (iv) a ngRNA or a polynucleotide encoding the ngRNA.

[0344] In some embodiments, a prime editing system comprises one or more polynucleotides encoding one or more prime editor polypeptides, wherein activity of the prime editing system can be temporally regulated by controlling the timing in which the vectors are delivered. For example, in some embodiments, a polynucleotide encoding the prime editor and a polynucleotide encoding a PEgRNA can be delivered simultaneously. For example, in some embodiments, a polynucleotide encoding the prime editor and a polynucleotide encoding a PEgRNA can be delivered sequentially.

[0345] In some embodiments, a polynucleotide encoding a component of a prime editing system can further comprise an element that is capable of modifying the intracellular half-life of the polynucleotide and/or modulating translational control. In some embodiments, the polynucleotide is a RNA, for example, an mRNA. In some embodiments, the half-life of the polynucleotide, e.g., the RNA may be increased. In some embodiments, the half-life of the polynucleotide, e.g., the RNA may be decreased. In some embodiments, the element may be capable of increasing the stability of the polynucleotide, e.g., the RNA. In some embodiments, the element may be capable of decreasing the stability of the polynucleotide, e.g., the RNA. In some embodiments, the element may be within the 3′ UTR of the RNA. In some embodiments, the element may include a polyadenylation signal (PA). In some embodiments, the element may include a cap, e.g., an upstream mRNA or PEgRNA end. In some embodiments, the RNA may comprise no PA such that it is subject to quicker degradation in the cell after transcription.

[0346] In some embodiments, the element may include at least one AU-rich element (ARE). The AREs may be bound by ARE binding proteins (ARE-BPs) in a manner that is dependent upon tissue type, cell type, timing, cellular localization, and environment. In some embodiments the destabilizing element may promote RNA decay, affect RNA stability, or activate translation. In some embodiments, the ARE may comprise 50 to 150 nucleotides in length. In some embodiments, the ARE may comprise at least one copy of the sequence AUUUA. In some embodiments, at least one ARE may be added to the 3′ UTR of the RNA. In some embodiments, the element may be a Woodchuck Hepatitis Virus Posttranscriptional Regulatory Element (WPRE). In further embodiments, the element is a modified and/or truncated WPRE sequence that is capable of enhancing expression from the transcript. In some embodiments, the WPRE or equivalent may be added to the 3′ UTR of the RNA. In some embodiments, the element may be selected from other RNA sequence motifs that are enriched in either fast- or slow-decaying transcripts. In some embodiments, the polynucleotide, e.g., a vector, encoding the PE or the PEgRNA may be self-destroyed via cleavage of a target sequence present on the polynucleotide, e.g., a vector. The cleavage may prevent continued transcription of a PE or a PEgRNA.

[0347] Polynucleotides encoding prime editing composition components can be DNA, RNA, or any combination thereof. In some embodiments, a polynucleotide encoding a prime editing composition component is an expression construct. In some embodiments, a polynucleotide encoding a prime editing composition component is a vector. In some embodiments, the vector is a DNA vector. In some embodiments, the vector is a plasmid. In some embodiments, the vector is a virus vector, e.g., a retroviral vector, adenoviral vector, lentiviral vector, herpesvirus vector, or an adeno-associated virus vector (AAV).

[0348] In some embodiments, polynucleotides encoding polypeptide components of a prime editing composition are codon optimized by replacing at least one codon (e.g., about or more than about 1, 2, 3, 4, 5, 10, 15, 20, 25, 50, or more codons) of the native sequence with codons that are more frequently or most frequently used in the genes of that host cell while maintaining the native amino acid sequence. In some embodiments, a polynucleotide encoding a polypeptide component of a prime editing composition are operably linked to one or more expression regulatory elements, for example, a promoter, a 3′ UTR, a 5′ UTR, or any combination thereof. In some embodiments, a polynucleotide encoding a prime editing composition component is a messenger RNA (mRNA). In some embodiments, the mRNA comprises a Cap at the 5′ end and/or a poly A tail at the 3′ end.

[0349] In some embodiments, the PEgRNA as described herein comprises a spacer that comprises a sequence selected from the group consisting of SEQ ID Nos. 1, 182, 294, 483, 682, 1505, 2023, 2293, 4425, 5206, 5228, 5248, 5282, 5313, 5340, 5369, 5406, 5423, 5446, 5473, 5503, 5537, 5555, 5638, and 5706.

[0350] In some embodiments, the PEgRNA as described herein comprises a editing template that comprises a sequence selected from the group consisting of SEQ ID Nos.: 13-17, 194-198, 306-336, 495-528, 694-735, 1517-1546, 2035-2044, 2305-2422, 4437-4492, 5218, 5240-5247, 5260-5279, 5294-5302, 5325-5338, 5352-5368, 5381-5401, 5418-5422, 5435-5445, 5458-5472, 5485-5502, 5515-5535, 5549-5554, 5567-5590, 5650-5668, and 5718-5738.

[0351] In some embodiments, the PEgRNA as described herein comprises a PBS that comprises a sequence selected from the group consisting of SEQ ID Nos. 2-12, 183-193, 295-305, 484-494, 683-693, 1506-1516, 2024-2034, 2294-2304, 4426-4436, 5207-5217, 5229-5239, 5249-5259, 5283-5293, 5314-5324, 5341-5351, 5370-5380, 5407-5417, 5424-5434, 5447-5457, 5474-5484, 5504-5514, 5538-5548, 5556-5566, 5639-5649, and 5707-5717.

[0352] In some embodiments, the PEgRNA as described herein comprises a sequence selected from the group consisting of SEQ ID Nos. 73-152, 210-289, 338-482, 530-680, 741-1500, 1547-2022, 2097-2256, 2445-4409, 4493-5205, 5591-5637, 5669-5705, and 5739-5779.

[0353] In some embodiments, the ngRNA disclosed herein comprises a ng spacer that comprises a sequence selected from the group consisting of SEQ ID Nos. 18-72, 199-209, 337, 529, 736-740, 2045-2096, 2423-2444, 5219-5227, 5280-5281, 5303-5312, 5339, 5402-5405, and 5536.

[0354] In some embodiments, the ngRNA disclosed herein comprises a sequence selected from the group consisting of SEQ ID NOs: 153-181.

### Pharmaceutical Compositions

[0355] Disclosed herein are pharmaceutical compositions comprising any of the prime editing composition components, for example, prime editors, fusion proteins, polynucleotides encoding prime editor polypeptides, PEgRNAs, ngRNAs, and/or prime editing complexes described herein.

[0356] The term “pharmaceutical composition”, as used herein, refers to a composition formulated for pharmaceutical use. In some embodiments, the pharmaceutical composition further comprises a pharmaceutically acceptable carrier. In some embodiments, the pharmaceutical composition comprises additional agents, e.g., for specific delivery, increasing half-life, or other therapeutic compounds.

[0357] In some embodiments, a pharmaceutically-acceptable carrier comprises any vehicle, such as a liquid or solid filler, diluent, excipient, manufacturing aid (e.g., lubricant, tale magnesium, calcium or zinc stearate, or steric acid), or solvent encapsulating material, involved in carrying or transporting the compound from one site (e.g., the delivery site) of the body, to another site (e.g., organ, tissue or portion of the body). A pharmaceutically acceptable carrier is “acceptable” in the sense of being compatible with the other ingredients of the formulation and not injurious to the tissue of the subject (e.g., physiologically compatible, sterile, physiologic pH, etc.).

[0358] Formulations of the pharmaceutical compositions described herein can be prepared by any method known or hereafter developed in the art of pharmacology. In general, such preparatory methods include the step of bringing the active ingredient(s) into association with an excipient and/or one or more other accessory ingredients, and then, if necessary and/or desirable, shaping and/or packaging the product into a desired single- or multi-dose unit. Pharmaceutical formulations can additionally comprise a pharmaceutically acceptable excipient, which, as used herein, includes any and all solvents, dispersion media, diluents, or other liquid vehicles, dispersion or suspension aids, surface active agents, isotonic agents, thickening or emulsifying agents, preservatives, solid binders, lubricants and the like, as suited to the particular dosage form desired.

### Methods of Editing

[0359] The methods and compositions disclosed herein can be used to edit a target gene of interest by prime editing.

[0360] In some embodiments, the prime editing method comprises contacting a target gene, e.g., an ATP7B gene, with a PEgRNA and a prime editor (PE) polypeptide described herein. In some embodiments, the target gene is double stranded, and comprises two strands of DNA complementary to each other. In some embodiments, the contacting with a PEgRNA and the contacting with a prime editor are performed sequentially. In some embodiments, the contacting with a prime editor is performed after the contacting with a PEgRNA. In some embodiments, the contacting with a PEgRNA is performed after the contacting with a prime editor. In some embodiments, the contacting with a PEgRNA, and the contacting with a prime editor are performed simultaneously. In some embodiments, the PEgRNA and the prime editor are associated in a complex prior to contacting a target gene.

[0361] In some embodiments, contacting the target gene with the prime editing composition results in binding of the PEgRNA to a target strand of the target gene, e.g., an ATP7B gene. In some embodiments, contacting the target gene with the prime editing composition results in binding of the PEgRNA to a search target sequence on the target strand of the target gene upon contacting with the PEgRNA. In some embodiments, contacting the target gene with the prime editing composition results in binding of a spacer sequence of the PEgRNA to a search target sequence with the search target sequence on the target strand of the target gene upon said contacting of the PEgRNA.

[0362] In some embodiments, contacting the target gene with the prime editing composition results in binding of the prime editor to the target gene, e.g. the target ATP7B gene, upon the contacting of the PE composition with the target gene. In some embodiments, the DNA binding domain of the PE associates with the PEgRNA. In some embodiments, the PE binds the target gene, e.g. an ATP7B gene, directed by the PEgRNA. Accordingly, in some embodiments, the contacting of the target gene result in binding of a DNA binding domain of a prime editor of the target ATP7B gene directed by the PEgRNA.

[0363] In some embodiments, contacting the target gene with the prime editing composition results in a nick in an edit strand of the target gene, e.g. an ATP7B gene by the prime editor upon contacting with the target gene, thereby generating a nicked on the edit strand of the target gene. In some embodiments, contacting the target gene with the prime editing composition results in a single-stranded DNA comprising a free 3′ end at the nick site of the edit strand of the target gene. In some embodiments, contacting the target gene with the prime editing composition results in a nick in the edit strand of the target gene by a DNA binding domain of the prime editor, thereby generating a single-stranded DNA comprising a free 3′ end at the nick site. In some embodiments, the DNA binding domain of the prime editor is a Cas domain. In some embodiments, the DNA binding domain of the prime editor is a Cas9. In some embodiments, the DNA binding domain of the prime editor is a Cas9 nickase.

[0364] In some embodiments, contacting the target gene with the prime editing composition results in hybridization of the PEgRNA with the 3′ end of the nicked single-stranded DNA, thereby priming DNA polymerization by a DNA polymerase domain of the prime editor. In some embodiments, the free 3′ end of the single-stranded DNA generated at the nick site hybridizes to a primer binding site sequence (PBS) of the contacted PEgRNA, thereby priming DNA polymerization. In some embodiments, the DNA polymerization is reverse transcription catalyzed by a reverse transcriptase domain of the prime editor. In some embodiments, the method comprises contacting the target gene with a DNA polymerase, e.g., a reverse transcriptase, as a pail of a prime editor fusion protein or prime editing complex (in cis), or as a separate protein (in trans).

[0365] In some embodiments, contacting the target gene with the prime editing composition generates an edited single stranded DNA that is coded by the editing template of the PEgRNA by DNA polymerase mediated polymerization from the 3′ free end of the single-stranded DNA at the nick site. In some embodiments, the editing template of the PEgRNA comprises one or more intended nucleotide edits compared to endogenous sequence of the target gene, e.g., an ATP7B gene. In some embodiments, the intended nucleotide edits are incorporated in the target gene, by excision of the 5′ single stranded DNA of the edit strand of the target gene generated at the nick site and DNA repair. In some embodiments, the intended nucleotide edits are incorporated in the target gene by excision of the editing target sequence and DNA repair. In some embodiments, excision of the 5′ single stranded DNA of the edit strand generated at the nick site is by a flap endonuclease. In some embodiments, the flap nuclease is FEN1. In some embodiments, the method further comprises contacting the target gene with a flap endonuclease. In some embodiments, the flap endonuclease is provided as a part of a prime editor fusion protein. In some embodiments, the flap endonuclease is provided in trans.

[0366] In some embodiments, contacting the target gene with the prime editing composition generates a mismatched heteroduplex comprising the edit strand of the target gene that comprises the edited single stranded DNA, and the unedited target strand of the target gene. Without being bound by theory, the endogenous DNA repair and replication may resolve the mismatched edited DNA to incorporate the nucleotide change(s) to form the desired edited target gene.

[0367] In some embodiments, the method further comprises contacting the target gene, e.g. an ATP7B gene, with a nick guide (ngRNA) disclosed herein. In some embodiments, the ngRNA comprises a spacer that binds a second search target sequence on the edit strand of the target gene. In some embodiments, the contacted ngRNA directs the PE to introduce a nick in the target strand of the target gene. In some embodiments, the nick on the target strand (non-edit strand) results in endogenous DNA repair machinery to use the edit strand to repair the non-edit strand, thereby incorporating the intended nucleotide edit in both strand of the target gene and modifying the target gene. In some embodiments, the ngRNA comprises a spacer sequence that is complementary to, and may hybridize with, the second search target sequence on the edit strand only after the intended nucleotide edit(s) are incorporated in the edit strand of the target gene.

[0368] In some embodiments, the target gene is contacted by the ngRNA, the PEgRNA, and the IE simultaneously. In some embodiments, the ngRNA, the PEgRNA, and the PE form a complex when they contact the target gene. In some embodiments, the target gene is contacted with the ngRNA, the PEgRNA, and the prime editor sequentially. In some embodiments, the target gene is contacted with the ngRNA and/or the PEgRNA after contacting the target gene with the PE. In some embodiments, the target gene is contacted with the ngRNA and/or the PEgRNA before contacting the target gene with the prime editor.

[0369] In some embodiments, the target gene. e.g., an ATP7B gene, is in a cell. Accordingly, also provided herein are methods of modifying a cell.

[0370] In some embodiments, the prime editing method comprises introducing a PEgRNA, a prime editor, and/or a ngRNA into the cell that has the target gene. In some embodiments, the prime editing method comprises introducing into the cell that has the target gene with a prime editing composition comprising a PEgRNA, a prime editor polypeptide, and/or a ngRNA. In some embodiments, the PEgRNA, the prime editor polypeptide, and/or the ngRNA form a complex prior to the introduction into the cell. In some embodiments, the PEgRNA, the prime editor polypeptide, and/or the ngRNA form a complex after the introduction into the cell. The prime editors, PEgRNA and/or ngRNAs, and prime editing complexes may be introduced into the cell by any delivery approaches described herein or any delivery approach known in the art, including ribonucleoprotein (RNPs), lipid nanoparticles (LNPs), viral vectors, non-viral vectors, mRNA delivery, and physical techniques such as cell membrane disruption by a microfluidics device. The prime editors, PEgRNA and/or ngRNAs. and prime editing complexes may be introduced into the cell simultaneously or sequentially.

[0371] In some embodiments, the prime editing method comprises introducing into the cell a PEgRNA or a polynucleotide encoding the PEgRNA, a prime editor polynucleotide encoding a prime editor polypeptide, and optionally an ngRNA or a polynucleotide encoding the ngRNA. In some embodiments, the method comprises introducing the PEgRNA or the polynucleotide encoding the PEgRNA, the polynucleotide encoding the prime editor polypeptide, and/or the ngRNA or the polynucleotide encoding the ngRNA into the cell simultaneously. In some embodiments, the method comprises introducing the PEgRNA or the polynucleotide encoding the PEgRNA, the polynucleotide encoding the prime editor polypeptide, and/or the ngRNA or the polynucleotide encoding the ngRNA into the cell sequentially. In some embodiments, the method comprises introducing the polynucleotide encoding the prime editor polypeptide into the cell before introduction of the PEgRNA or the polynucleotide encoding the PEgRNA and/or the ngRNA or the polynucleotide encoding the ngRNA. In some embodiments, the polynucleotide encoding the prime editor polypeptide is introduced into and expressed in the cell before introduction of the PEgRNA or the polynucleotide encoding the PEgRNA and/or the ngRNA or the polynucleotide encoding the ngRNA into the cell. In some embodiments, the polynucleotide encoding the prime editor polypeptide is introduced into the cell after the PEgRNA or the polynucleotide encoding the PEgRNA and/or the ngRNA or the polynucleotide encoding the ngRNA are introduced into the cell. The polynucleotide encoding the prime editor polypeptide, the PEgRNA or the polynucleotide encoding the PEgRNA, and/or the ngRNA or the polynucleotide encoding the ngRNA, may be introduced into the cell by any delivery approaches described herein or any delivery approach known in the art, for example, by RNPs, LNPs, viral vectors, non-viral vectors, mRNA delivery, and physical.

[0372] In some embodiments, the polynucleotide encoding the prime editor polypeptide, the poly nucleotide encoding the PEgRNA, and/or the polynucleotide encoding the ngRNA integrate into the genome of the cell after being introduced into the cell. In some embodiments, the polynucleotide encoding the prime editor polypeptide, the polynucleotide encoding the PEgRNA, and/or the polynucleotide encoding the ngRNA are introduced into the cell for transient expression. Accordingly, also provided herein are cells modified by prime editing.

[0373] In some embodiments, the cell is a prokaryotic cell. In some embodiments, the cell is a eukaryotic cell. In some embodiments, the cell is a mammalian cell. In some embodiments, the cell is a non-human primate cell, bovine cell, porcine cell, rodent or mouse cell. In some embodiments, the cell is a human cell. In some embodiments, the cell is a primary cell. In some embodiments, the cell is a human primary cell. In some embodiments, the cell is a progenitor cell. In some embodiments, the cell is a human progenitor cell. In some embodiments, the cell is a hepatocyte. In some embodiments, the cell is a human hepatocyte. In some embodiments, the cell is a primary human hepatocyte derived from an induced human pluripotent stem cell (iPSC). In some embodiments, the cell is a neuron. In some embodiments, the cell is a neuron from basal ganglia. In some embodiments, the cell is a neuron from basal ganglia of a subject.

[0374] In some embodiments, the target gene edited by prime editing is in a chromosome of the cell. In some embodiments, the intended nucleotide edits incorporate in the chromosome of the cell and are inheritable by progeny cells. In some embodiments, the intended nucleotide edits introduced to the cell by the prime editing compositions and methods are such that the cell and progeny of the cell also include the intended nucleotide edits. In some embodiments, the cell is autologous, allogeneic, or xenogeneic to a subject. In some embodiments, the cell is from or derived from a subject. In some embodiments, the cell is from or derived from a human subject. In some embodiments, the cell is introduced back into the subject, e.g., a human subject, after incorporation of the intended nucleotide edits by prime editing.

[0375] In some embodiments, the method provided herein comprises introducing the prime editor polypeptide or the polynucleotide encoding the prime editor polypeptide, the PEgRNA or the polynucleotide encoding the PEgRNA, and/or the ngRNA or the polynucleotide encoding the ngRNA into a plurality or a population of cells that comprise the target gene. In some embodiments, the population of cells is of the same cell type. In some embodiments, the population of cells is of the same tissue or organ. In some embodiments, the population of cells is heterogeneous. In some embodiments, the population of cells is homogeneous. In some embodiments, the population of cells is from a single tissue or organ, and the cells are heterogeneous. In some embodiments, the introduction into the population of cells is ex vivo. In some embodiments, the introduction into the population of cells is in vivo, e.g., into a human subject.

[0376] In some embodiments, the target gene is in a genome of each cell of the population. In some embodiments, introduction of the prime editor polypeptide or the polynucleotide encoding the prime editor polypeptide, the PEgRNA or the polynucleotide encoding the PEgRNA, and/or the ngRNA or the polynucleotide encoding the ngRNA results in incorporation of one or more intended nucleotide edits in the target gene in at least one of the cells in the population of cells. In some embodiments, introduction of the prime editor polypeptide or the polynucleotide encoding the prime editor polypeptide, the PEgRNA or the polynucleotide encoding the PEgRNA, and/or the ngRNA or the polynucleotide encoding the ngRNA results in incorporation of the one or more intended nucleotide edits in the target gene in a plurality of the population of cells. In some embodiments, introduction of the prime editor polypeptide or the poly nucleotide encoding the prime editor polypeptide, the PEgRNA or the polynucleotide encoding the PEgRNA, and/or the ngRNA or the polynucleotide encoding the ngRNA results in incorporation of the one or more intended nucleotide edits in the target gene in each cell of the population of cells. In some embodiments, introduction of the prime editor polypeptide or the polynucleotide encoding the prime editor polypeptide, the PEgRNA or the polynucleotide encoding the PEgRNA, and/or the ngRNA or the polynucleotide encoding the ngRNA results in incorporation of the one or more intended nucleotide edits in the target gene in sufficient number of cells such that the disease or disorder is treated, prevented or ameliorated.

[0377] In some embodiments, editing efficiency of the prime editing compositions and method described herein can be measured by calculating the percentage of edited target genes in a population of cells introduced with the prime editing composition. In some embodiments, the editing efficiency is determined after 1 hour, 2 hours, 6 hours, 12 hours, 24 hours, 36 hours, 48 hours, 3 days, 4 days, 5 days, 7 days. 10 days, or 14 days of exposing a target gene (e.g., a ATP7B gene within the genome of a cell) to a prime editing composition. In some embodiments, the population of cells introduced with the prime editing composition is ex vivo. In some embodiments, the population of cells introduced with the prime editing composition is in vitro. In some embodiments, the population of cells introduced with the prime editing composition is in vivo. In some embodiments, the prime editing methods disclosed herein have an editing efficiency of at least about 1%, at least about 5%, at least about 10%, at least about 20%, at least about 30%, at least about 40%, at least about 50%, at least about 60%, at least about 70%, at least about 80%, at least about 90%, at least about 95%, or at least about 99% relative to a suitable control. In some embodiments, the prime editing methods disclosed herein have an editing efficiency of at least 25% relative to a suitable control. In some embodiments, the prime editing methods disclosed herein have an editing efficiency of at least 35% relative to a suitable control, prime editing method disclosed herein has an editing efficiency of at least 30% relative to a suitable control. In some embodiments, the prime editing methods disclosed herein have an editing efficiency of at least 45% relative to a suitable control. In some embodiments, the prime editing methods disclosed herein have an editing efficiency of at least 50% relative to a suitable control.

[0378] In some embodiments, the methods disclosed herein have an editing efficiency of at least about 1%, at least about 5%, at least about 7.5%, at least about 10%, at least about 15%, at least about 20%, at least about 30%, at least about 40%, at least about 50%, at least about 60%, at least about 70%, at least about 80%, at least about 90%, or at least about 95% of editing a primary cell relative to a suitable control.

[0379] In some embodiments, the methods disclosed herein have an editing efficiency of at least about 5%, at least about 7.5%, at least about 10%, at least about 15%, at least about 20%, at least about 30%, at least about 40%, at least about 50%, at least about 60%, at least about 70%, at least about 80%, at least about 90%, or at least about 95% of editing a hepatocyte relative to a corresponding control hepatocyte. In some embodiments, the hepatocyte is a human hepatocyte.

[0380] In some embodiments, the prime editing compositions provided herein are capable of incorporated one or more intended nucleotide edits without generating a significant proportion of indels. The term “indel(s)”, as used herein, refers to the insertion or deletion of a nucleotide base within a polynucleotide, for example, a target gene. Such insertions or deletions can lead to frame shift mutations within a coding region of a gene. Indel frequency of editing can be calculated by methods known in the art. In some embodiments, indel frequency can be calculated based on sequence alignment such as the CRISPResso 2 algorithm as described in Clement et al., Nat. Biotechnol. 37(3): 224-226 (2019), which is incorporated herein in its entirety. In some embodiments, the methods disclosed herein can have an indel frequency of less than 20%, less than 10%, less than 9%, less than 8%, less than 7%, less than 6%, less than 5%, less than 4%, less than 3%, less than 2%, less than 1.5%, or less than 1%. In some embodiments, any number of indels is determined after at least 1 hour, at least 2 hours, at least 6 hours, at least 12 hours, at least 24 hours, at least 36 hours, at least 48 hours, at least 3 days, at least 4 days, at least 5 days, at least 7 days, at least 10 days, or at least 14 days of exposing a target gene (e.g., a ATP7B gene within the genome of a cell) to a prime editing composition.

[0381] In some embodiments, the prime editing compositions provided herein are capable of incorporated one or more intended nucleotide edits efficiently without generating a significant proportion of indels. In some embodiments, the prime editing methods disclosed herein have an editing efficiency of at least about 1% and an indel frequency of less than 1% in a target cell, e.g., a human primary cell or hepatocyte. In some embodiments, the prime editing methods disclosed herein have an editing efficiency of at least about 1% and an indel frequency of less than 0.5% in a target cell, e.g., a human primary cell or hepatocyte. In some embodiments, the prime editing methods disclosed herein have an editing efficiency of at least about 1% and an indel frequency of less than 0.1% in a target cell, e.g., a human primary cell or hepatocyte. In some embodiments, the prime editing methods disclosed herein have an editing efficiency of at least about 5% and an indel frequency of less than 1% in a target cell, e.g., a human primary cell or hepatocyte. In some embodiments, the prime editing methods disclosed herein have an editing efficiency of at least about 5% and an indel frequency of less than 0.5% in a target cell, e.g., a human primary cell or hepatocyte. In some embodiments, the prime editing methods disclosed herein have an editing efficiency of at least about 5% and an indel frequency of less than 0.1% in a target cell, e.g., a human primary cell or hepatocyte.

[0382] In some embodiments, the prime editing methods disclosed herein have an editing efficiency of at least about 7.5% and an indel frequency of less than 1% in a target cell, e.g., a human primary cell or hepatocyte. In some embodiments, the prime editing methods disclosed herein have an editing efficiency of at least about 7.5% and an indel frequency of less than 0.5% in a target cell, e.g., a human primary cell or hepatocyte. In some embodiments, the prime editing methods disclosed herein have an editing efficiency of at least about 7.5% and an indel frequency of less than 0.1% in a target cell, e.g., a human primary cell or hepatocyte.

[0383] In some embodiments, the prime editing methods disclosed herein have an editing efficiency of at least about 10% and an indel frequency of less than 1% in a target cell, e.g., a human primary cell or hepatocyte. In some embodiments, the prime editing methods disclosed herein have an editing efficiency of at least about 10% and an indel frequency of less than 0.5% in a target cell, e.g., a human primary cell or hepatocyte. In some embodiments, the prime editing methods disclosed herein have an editing efficiency of at least about 10% and an indel frequency of less than 0.1% in a target cell, e.g., a human primary cell or hepatocyte.

[0384] In some embodiments, the prime editing methods disclosed herein have an editing efficiency of at least about 15% and an indel frequency of less than 1% in a target cell, e.g., a human primary cell or hepatocyte. In some embodiments, the prime editing methods disclosed herein have an editing efficiency of at least about 15% and an indel frequency of less than 0.5% in a target cell, e.g., a human primary cell or hepatocyte. In some embodiments, the prime editing methods disclosed herein have an editing efficiency of at least about 15% and an indel frequency of less than 0.1% in a target cell, e.g., a human primary cell or hepatocyte.

[0385] In some embodiments, the prime editing methods disclosed herein have an editing efficiency of at least about 20% and an indel frequency of less than 1% in a target cell, e.g., a human primary cell or hepatocyte. In some embodiments, the prime editing methods disclosed herein have an editing efficiency of at least about 20% and an indel frequency of less than 0.5% in a target cell, e.g., a human primary cell or hepatocyte. In some embodiments, the prime editing methods disclosed herein have an editing efficiency of at least about 20% and an indel frequency of less than 0.1% in a target cell, e.g., a human primary cell or hepatocyte.

[0386] In some embodiments, the prime editing methods disclosed herein have an editing efficiency of at least about 30% and an indel frequency of less than 1% in a target cell, e.g., a human primary cell or hepatocyte. In some embodiments, the prime editing methods disclosed herein have an editing efficiency of at least about 30% and an indel frequency of less than 0.5% in a target cell, e.g., a human primary cell or hepatocyte. In some embodiments, the prime editing methods disclosed herein have an editing efficiency of at least about 30% and an indel frequency of less than 0.1% in a target cell, e.g., a human primary cell or hepatocyte.

[0387] In some embodiments, the prime editing methods disclosed herein have an editing efficiency of at least about 40% and an indel frequency of less than 1% in a target cell, e.g., a human primary cell or hepatocyte. In some embodiments, the prime editing methods disclosed herein have an editing efficiency of at least about 40% and an indel frequency of less than 0.5% in a target cell, e.g., a human primary cell or hepatocyte. In some embodiments, the prime editing methods disclosed herein have an editing efficiency of at least about 40% and an indel frequency of less than 0.1% in a target cell, e.g., a human primary cell or hepatocyte.

[0388] In some embodiments, the prime editing methods disclosed herein have an editing efficiency of at least about 50% and an indel frequency of less than 1% in a target cell, e.g., a human primary cell or hepatocyte. In some embodiments, the prime editing methods disclosed herein have an editing efficiency of at least about 50% and an indel frequency of less than 0.5% in a target cell, e.g., a human primary cell or hepatocyte. In some embodiments, the prime editing methods disclosed herein have an editing efficiency of at least about 50% and an indel frequency of less than 0.1% in a target cell, e.g., a human primary cell or hepatocyte.

[0389] In some embodiments, the prime editing methods disclosed herein have an editing efficiency of at least about 60% and an indel frequency of less than 1% in a target cell, e.g., a human primary cell or hepatocyte. In some embodiments, the prime editing methods disclosed herein have an editing efficiency of at least about 60% and an indel frequency of less than 0.5% in a target cell, e.g., a human primary cell or hepatocyte. In some embodiments, the prime editing methods disclosed herein have an editing efficiency of at least about 60% and an indel frequency of less than 0.1% in a target cell, e.g., a human primary cell or hepatocyte.

[0390] In some embodiments, the prime editing methods disclosed herein have an editing efficiency of at least about 70% and an indel frequency of less than 1% in a target cell, e.g., a human primary cell or hepatocyte. In some embodiments, the prime editing methods disclosed herein have an editing efficiency of at least about 70% and an indel frequency of less than 0.5% in a target cell, e.g., a human primary cell or hepatocyte. In some embodiments, the prime editing methods disclosed herein have an editing efficiency of at least about 70% and an indel frequency of less than 0.1% in a target cell, e.g., a human primary cell or hepatocyte.

[0391] In some embodiments, the prime editing methods disclosed herein have an editing efficiency of at least about 80% and an indel frequency of less than 1% in a target cell, e.g., a human primary cell or hepatocyte. In some embodiments, the prime editing methods disclosed herein have an editing efficiency of at least about 80% and an indel frequency of less than 0.5% in a target cell, e.g., a human primary cell or hepatocyte. In some embodiments, the prime editing methods disclosed herein have an editing efficiency of at least about 80% and an indel frequency of less than 0.1% in a target cell, e.g., a human primary cell or hepatocyte.

[0392] In some embodiments, the prime editing methods disclosed herein have an editing efficiency of at least about 90% and an indel frequency of less than 1% in a target cell, e.g., a human primary cell or hepatocyte. In some embodiments, the prime editing methods disclosed herein have an editing efficiency of at least about 90% and an indel frequency of less than 0.5% in a target cell, e.g., a human primary cell or hepatocyte. In some embodiments, the prime editing methods disclosed herein have an editing efficiency of at least about 90% and an indel frequency of less than 0.1% in a target cell, e.g., a human primary cell or hepatocyte.

[0393] In some embodiments, the prime editing methods disclosed herein have an editing efficiency of at least about 95% and an indel frequency of less than 1% in a target cell, e.g., a human primary cell or hepatocyte. In some embodiments, the prime editing methods disclosed herein have an editing efficiency of at least about 95% and an indel frequency of less than 0.5% in a target cell, e.g., a human primary cell or hepatocyte. In some embodiments, the prime editing methods disclosed herein have an editing efficiency of at least about 95% and an indel frequency of less than 0.1% in a target cell, e.g., a human primary cell or hepatocyte. In some embodiments, any number of indels is determined after at least 1 hour, at least 2 hours, at least 6 hours, at least 12 hours, at least 24 hours, at least 36 hours, at least 48 hours, at least 3 days, at least 4 days, at least 5 days, at least 7 days, at least 10 days, or at least 14 days of exposing a target gene (e.g., a ATP7B gene within the genome of a cell) to a prime editing composition. In some embodiments, the editing efficiency is determined after 1 hour, 2 hours, 6 hours, 12 hours, 24 hours, 36 hours, 48 hours, 3 days, 4 days, 5 days, 7 days, 10 days, or 14 days of exposing a target gene (e.g., a ATP7B gene within the genome of a cell) to a prime editing composition.

[0394] In some embodiments, the prime editing composition described herein result in less than 50%, less than 40%, less than 30%, less than 20%, less than 19%, less than 18%, less than 17%, less than 16%, less than 15%, less than 14%, less than 13%, less than 12%, less than 11%, less than 10%, less than 9%, less than 8%, less than 7%, less than 6%, less than 5%, less than 4%, less than 3%, less than 2%, less than 1%, less than 0.9%, less than 0.8%, less than 0.7%, less than 0.6%, less than 0.5%, less than 0.4%, less than 0.3%, less than 0.2%, less than 0.1%, less than 0.09%, less than 0.08%, less than 0.07%, less than 0.06%, less than 0.05%, less than 0.04%, less than 0.03%, less than 0.02%, or less than 0.01% off-target editing in a chromosome that includes the target gene. In some embodiments, off-target editing is determined after at least 1 hour, at least 2 hours, at least 6 hours, at least 12 hours, at least 24 hours, at least 36 hours, at least 48 hours, at least 3 days, at least 4 days, at least 5 days, at least 7 days, at least 10 days, or at least 14 days of exposing a target gene (e.g., a nucleic acid within the genome of a cell) to a prime editing composition.

[0395] In some embodiments, the prime editing compositions (e.g., PEgRNAs and prime editors as described herein) and prime editing; methods disclosed herein can be used to edit a target ATP7B gene. In some embodiments, the target ATP7B gene comprises a mutation compared to a wild type ATP7B gene. In some embodiments, the mutation is associated with Wilson's disease. In some embodiments, the target ATP7B gene comprises an editing target sequence that contains the mutation associated with Wilson's disease. In some embodiments, the mutation is in a coding region of the target ATP7B gene. In some embodiments, the mutation is in an exon of the target ATP7B gene. In some embodiments, the mutation is in exon 1, exon 2, exon 3, exon 4, exon 5, exon 6, exon 7, exon 8, exon 9, exon 10, exon 11, exon 12, exon 13, exon 14, exon 15, exon 16, exon 17, exon 18, exon 19, exon 20, or exon 21 of the ATP7B gene as compared to a wild type ATP7B gene. In some embodiments, the mutation is exon 8, exon 13, exon 14, exon 15, or exon 17 of the ATP71B gene as compared to a wild type ATP7B gene. In some embodiments, the mutation is in exon 3 of the ATP7B gene as compared to a wild type ATP7B gene. In some embodiments, the mutation is located in exon 8 of the ATP7B gene as compared to a wild type ATP7B gene. In some embodiments, the mutation is not a c.1288dup duplication. In some embodiments, the mutation is in exon 14 of the target ATP7B gene. In some embodiments, the mutation is located between positions 51944045 and 51944245 of human chromosome 13 as set forth in human genome assembly consortium Human build 38 (GRCh38), GenBank accession GCA_000001405.15. In some embodiments, the mutation encodes an amino acid substitution H1069Q relative to a wild type ATP7B polypeptide set forth in SEQ ID NO: 5861. In some embodiments, the editing target sequence comprises a C>A mutation at position 51944145 in human chromosome 13 as set forth in human genome assembly consortium Human build 38 (GRCh38), GenBank accession GCA_000001405.15. In some embodiments, the prime editing method comprises contacting a target ATP7B gene with a prime editing composition comprising a prime editor, a PEgRNA, and/or a ngRNA. In some embodiments, contacting the target ATP7B gene with the prime editing composition results in incorporation of one or more intended nucleotide edits in the target ATP7B gene. In some embodiments, the incorporation is in a region of the target ATP7B gene that corresponds to an editing target sequence inn the ATP7B gene. In some embodiments, the one or more intended nucleotide edits comprises a single nucleotide substitution, an insertion, a deletion, or any combination thereof, compared to the endogenous sequence of the target ATP7B gene. In some embodiments, incorporation of the one or more intended nucleotide edits results in replacement of one or more mutations with the corresponding sequence that encodes a wild type ATP7B polypeptide set forth in SEQ ID NO: 5861. In some embodiments, incorporation of the one or more intended nucleotide edits results in replacement of the one or more mutations with the corresponding sequence in a wild type ATP7B gene. In some embodiments, incorporation of the one more intended nucleotide edits results in correction of a mutation in the target ATP7B gene. In some embodiments, the target A P7B1 gene comprises an editing template sequence that contains the mutation. In some embodiments, contacting the target ATP7B gene with the prime editing composition results in incorporation of one or more intended nucleotide edits in the target ATP7B gene, which corrects the mutation in the editing target sequence (or a double stranded region comprising the editing target sequence and the complementary sequence to the editing target sequence on a target strand) in the target ATP73 gene.

[0396] In some embodiments, incorporation of the one more intended nucleotide edits results in correction of a mutation in exon 14 of the target ATP7B gene as compared to a wild type ATP7B gene. In some embodiments, incorporation of the one more intended nucleotide edits results in correction of a mutation located between positions 51944045 and 51944245 of human chromosome 13 in the target ATP7B gene as set forth in human genome assembly consortium Human build 38 (GRCh38), GenBank accession GCA_000001405.15. In some embodiments, incorporation of the one more intended nucleotide edits results in an A>C nucleotide substitution at position 51944145 in human chromosome 13 in the target ATP7B gene as compared to the endogenous sequence of the target ATP7B gene, thereby correcting a C>A mutation at position 51944145 in human chromosome 13 in the target ATP7B gene as set forth in human genome assembly consortium Human build 38 (GRCh38), GenBank accession GCA_000001405.15. In some embodiments, incorporation of the one more intended nucleotide edits results in correction of an ATP7B gene sequence that encodes a H1069Q amino acid substitution, and restores wild type expression and function of the ATP7B protein.

[0397] In some embodiments, the target ATP7B gene is in a target cell. Accordingly, in one aspect provided herein is a method of editing a target cell comprising a target ATP7B gene that encodes a polypeptide that comprises one or more mutations relative to a wild type ATP7B gene. In some embodiments, the methods of the present disclosure comprise introducing a prime editing composition comprising a PEgRNA, a prime editor polypeptide, and/or a ngRNA into the target cell that has the target ATP7B gene to edit the target ATP7B gene, thereby generating an edited cell. In some embodiments, the target cell is a mammalian cell. In some embodiments, the target cell is a human cell. In some embodiments, the target cell is a primary cell. In some embodiments, the target cell is a human primary cell. In some embodiments, the target cell is a progenitor cell. In some embodiments, the target cell is a human progenitor cell. In some embodiments, the target cell is a stein cell. In some embodiments, the target cell is a human stem cell. In some embodiments, the target cell is a hepatocyte. In some embodiments, the target cell is a human hepatocyte. In some embodiments, the target cell is a primary human hepatocyte derived from an induced human pluripotent stem cell (iPSC). In some embodiments, the cell is a neuron. In some embodiments, the cell is a neuron from basal ganglia. In some embodiments, the cell is a neuron from basal ganglia of a subject. In some embodiments, the cell is a neuron in the basal ganglia of a subject.

[0398] In some embodiments, components of a prime editing composition described herein are provided to a target cell in vitro. In some embodiments, components of a prime editing composition described herein are provided to a target cell ex vivo. In some embodiments, components of a prime editing composition described herein are provided to a target cell in vivo.

[0399] In some embodiments, incorporation of the one or more intended nucleotide edits in the target ATP7B gene that comprises one or more mutations restores wild type expression and function of the ATP7B protein encoded by the ATP7B gene. In some embodiments, the target ATP7 gene encodes a H1069Q amino acid substitution as compared to the wild type ATP7B protein prior to incorporation of the one or more intended nucleotide edits. In some embodiments, expression and/or function of the ATP7B protein may be measured when expressed in a target cell. In some embodiments, incorporation of the one or more intended nucleotide edits in the target ATP7B gene comprising one or more mutations lead to a fold change in a level of ATP7B gene expression, ATP7B protein expression, or a combination thereof. In some embodiments, a change in the level of ATP7B expression level can comprise a fold change of, e.g., 2-fold, 3-fold, 4-fold, 5-fold, 6-fold, 7-fold, 8-fold, 9-fold. 10-fold, 15-fold, 20-fold, 25-fold, 30-fold. 40-fold, 50-fold. 60-fold, 70-fold, 80-fold, 90-fold, 100-fold or greater as compared to expression in a suitable control cell not introduced with a prime editing composition described herein. In some embodiments, incorporation of the one or more intended nucleotide edits in the target ATP7B gene that comprises one or more mutations restores wild type expression of the ATP7B protein by at least 10%, 20%, 30%, 40%, 50%, 60%, 70%, 80%. 90% 95%, o99% or more as compared to wild type expression of the ATP7B protein in a suitable control cell that comprises a wild type ATP7B gene.

[0400] In some embodiments, an ATP7B expression increase can be measured by a functional assay. In some embodiments, the functional assay can comprise a copper sensitivity assay, a cell viability assay, or a combination thereof. In some embodiments, protein expression can be measured using a protein assay. In some embodiments, protein expression can be measured using antibody testing. In some embodiments, an antibody can comprise anti-ATP7B. In some embodiments, protein expression can be measured using ELISA, mass spectrometry, Western blot, sodium dodecyl sulfate polyacrylamide gel electrophoresis (SDS-PAGE), high performance liquid chromatography (HPLC), electrophoresis, or any combination thereof. In some embodiments, a protein assay can comprise SDS-PAGE and densitometric analysis of a Coomassie Blue-stained gel. In some embodiments, ATP7B activity can be measured by measuring ATPase activity. In some embodiments, ATPase activity can be measured using an ATPase assay.

### Methods of Treating Wilson's Disease

[0401] In some embodiments, provided herein are methods for treatment of a subject diagnosed with a disease associated with or caused by one or more pathogenic mutations that can be corrected by prime editing. In some embodiments, provided herein are methods for treating Wilson's disease that comprise administering to a subject a therapeutically effective amount of a prime editing composition, or a pharmaceutical composition comprising a prime editing composition as described herein. In some embodiments, administration of the prime editing composition results in incorporation of one or more intended nucleotide edits in the target gene in the subject. In some embodiments, administration of the prime editing composition results in correction of one or more pathogenic mutations, e.g. point mutations, insertions, or deletions, associated with Wilson's disease in the subject. In some embodiments, the target gene comprise an editing target sequence that contains the pathogenic mutation. In some embodiments, administration of the prime editing composition results in incorporation of one or more intended nucleotide edits in the target gene that corrects the pathogenic mutation in the editing target sequence (or a double stranded region comprising the editing target sequence and the complementary sequence to the editing target sequence on a target strand) of the target gene in the subject.

[0402] In some embodiments, the method provided herein comprises administering to a subject an effective amount of a prime editing composition, for example, a PEgRNA, a prime editor, and/or a ngRNA. In some embodiments, the method comprises administering to the subject an effective amount of a prime editing composition described herein, for example, polynucleotides, vectors, or constructs that encode prime editing composition components, or RNPs, LNPs, and/or polypeptides comprising prime editing composition components. Prime editing compositions can be administered to target the ATP7B gene in a subject, e.g., a human subject, suffering from, having, susceptible to, or at risk for Wilsons' disease. Identifying a subject in need of such treatment can be in the judgment of a subject or a health care professional and can be subjective (e.g. opinion) or objective (e.g. measurable by a test or diagnostic method). In some embodiments, the subject has Wilson's disease.

[0403] In some embodiments, the subject has been diagnosed with Wilson's disease by sequencing of a ATP7B gene in the subject. In some embodiments, the subject comprises at least a copy of ATP7B gene that comprises one or more mutations compared to a wild type ATP7B gene. In some embodiments, the subject comprises at least a copy of ATP7B gene that comprises a mutation in a coding region of the ATP7B gene. In some embodiments, the subject comprises at least a copy of ATP7B gene that comprises a mutation in exon 1, exon 2, exon 3, exon 4, exon 5, exon 6, exon 7, exon 8, exon 9, exon 10, exon 11, exon 12, exon 13, exon 14, exon 15, exon 16, exon 17, exon 18, exon 19, exon 20, or exon 21, as compared to a wild type ATP7B gene. In some embodiments, the subject comprises at least a copy of ATP7B gene that comprises a mutation in exon 8, exon 13, exon 14, exon 15, or exon 17 as compared to a wild type ATP7B gene. In some embodiments, the subject comprises at least a copy of ATP7B gene that comprises a mutation in exon 14 of the ATP7B gene as compared to a wild type ATP7B gene. In some embodiments, the subject comprises at least a copy of ATP7B gene that comprises a mutation in exon 3 as compared to a wild type ATP7B gene. In some embodiments, the mutation is not a c.1288dup duplication. In some embodiments, the subject comprises at least a copy of ATP7B gene that encodes a polypeptide that comprises an amino acid substitution H1069Q relative to a wild type ATP7B polypeptide set forth in SEQ ID NO: 5861.

[0404] In some embodiments, the method comprises directly administering prime editing compositions provided herein to a subject. The prime editing compositions described herein can be delivered with in any form as described herein, e.g., as LNPs, RNPs, polynucleotide vectors such as viral vectors, or mRNAs. The prime editing compositions can be formulated with any pharmaceutically acceptable carrier described herein or known in the art for administering directly to a subject. Components of a prime editing composition or a pharmaceutical composition thereof may be administered to the subject simultaneously or sequentially. For example, in some embodiments, the method comprises administering a prime editing composition, or pharmaceutical composition thereof, comprising a complex that comprises a prime editor fusion protein and a PEgRNA and/or a ngRNA, to a subject. In some embodiments, the method comprises administering a polynucleotide or vector encoding a prime editor to a subject simultaneously with a PEgRNA and/or a ngRNA. In some embodiments, the method comprises administering a polynucleotide or vector encoding a prime editor to a subject before administration with a PEgRNA and/or a ngRNA.

[0405] Suitable routes of administrating the prime editing compositions to a subject include, without limitation: topical, subcutaneous, transdermal, intradermal, intralesional, intraarticular, intraperitoneal, intravesical, transmucosal, gingival, intradental, intracochlear, transtympanic, intraorgan, epidural, intrathecal, intramuscular, intravenous, intravascular, intraosseus, periocular, intratumoral, intracerebral, and intracerebroventricular administration. In some embodiments, the compositions described are administered intraperitoneally, intravenously, or by direct injection or direct infusion. In some embodiments, the compositions described are administered by direct injection or infusion into the liver of a subject. In some embodiments, the compositions described herein are administered to a subject by injection, by means of a catheter, by means of a suppository, or by means of an implant.

[0406] In some embodiments, the method comprises administering cells edited with a prime editing composition described herein to a subject. In some embodiments, the cells are allogeneic. In some embodiments, allogeneic cells are or have been contacted ex vivo with a prime editing composition or pharmaceutical composition thereof and are introduced into a human subject in need thereof. In some embodiments, the cells are autologous to the subject. In some embodiments, cells are removed from a subject and contacted ex vivo with a prime editing composition or pharmaceutical composition thereof and are re-introduced into the subject.

[0407] In some embodiments, cells are contacted ex vivo with one or more components of a prime editing composition. In some embodiments, the ex vivo-contacted cells are introduced into the subject, and the subject is administered in vivo with one or more components of a prime editing composition. For example, in some embodiments, cells are contacted ex vivo with a prime editor and introduced into a subject. In some embodiments, the subject is then administered with a PEgRNA and/or a ngRNA, or a polynucleotide encoding the PEgRNA and/or the ngRNA.

[0408] In some embodiments, cells contacted with the prime editing composition are determined for incorporation of the one or more intended nucleotide edits in the genome before re-introduction into the subject. In some embodiments, the cells are enriched for incorporation of the one or more intended nucleotide edits in the genome before re-introduction into the subject. In some embodiments, the edited cells are primary cells. In some embodiments, the edited cells are progenitor cells. In some embodiments, the edited cells are stem cells. In some embodiments, the edited cells are hepatocytes. In some embodiments, the edited cells are primary human cells. In some embodiments, the edited cells are human progenitor cells. In some embodiments, the edited cells are human stem cells. In some embodiments, the edited cells are human hepatocytes. In some embodiments, the cell is a neuron. In some embodiments, the cell is a neuron from basal ganglia. In some embodiments, the cell is a neuron from basal ganglia of a subject. In some embodiments, the cell is a neuron in the basal ganglia of a subject. The prime editing composition or components thereof may be introduced into a cell by any delivery approaches as described herein, including LNP administration, RNP administration, electroporation, nucleofection, transfection, viral transduction, microinjection, cell membrane disruption and diffusion, or any other approach known in the art.

[0409] The cells edited with prime editing can be introduced into the subject by any route known in the art. In some embodiments, the edited cells are administered to a subject by direct infusion. In some embodiments, the edited cells are administered to a subject by intravenous infusion. In some embodiments, the edited cells are administered to a subject as implants.

[0410] The pharmaceutical compositions, prime editing compositions, and cells, as described herein, can be administered in effective amounts. In some embodiments, the effective amount depends upon the mode of administration. In some embodiments, the effective amount depends upon the stage of the condition, the age and physical condition of the subject, the nature of concurrent therapy, if any, and like factors well-known to the medical practitioner.

[0411] The specific dose administered can be a uniform dose for each subject. Alternatively, a subject's dose can be tailored to the approximate body weight of the subject. Other factors in determining the appropriate dosage can include the disease or condition to be treated or prevented, the severity of the disease, the route of administration, and the age, sex and medical condition of the patient.

[0412] In embodiments wherein components of a prime editing composition are administered sequentially, the time between sequential administration can be at least 1 hour, at least 2 hours, at least 6 hours, at least 12 hours, at least 24 hours, at least 36 hours, at least 48 hours, at least 3 days, at least 4 days, at least 5 days, at least 7 days, at least 10 days, or at least 14 days.

[0413] In some embodiments, a method of monitoring treatment progress is provided. In some embodiments, the method includes the step of determining a level of diagnostic marker, for example, correction of a mutation in ATP7B gene, or diagnostic measurement associated with Wilson's disease, (e.g., copper sensitivity screen or assay) in a subject suffering from Wilson's disease symptoms and has been administered an effective amount of a prime editing composition described herein. The level of the diagnostic marker determined in the method can be compared to known levels of the marker in either healthy normal controls or in other afflicted subjects to establish the subject's disease status.

### Delivery

[0414] Prime editing compositions described herein can be delivered to a cellular environment with any approach known in the art. Components of a prime editing composition can be delivered to a cell by the same mode or different modes. For example, in some embodiments, a prime editor can be delivered as a polypeptide or a polynucleotide (DNA or RNA) encoding the polypeptide. In some embodiments, a PEgRNA can be delivered directly as an RNA or as a DNA encoding the PEgRNA.

[0415] In some embodiments, a prime editing composition component is encoded by a polynucleotide, a vector, or a construct. In some embodiments, a prime editor polypeptide, a PEgRNA and/or a ngRNA is encoded by a polynucleotide. In some embodiments, the polynucleotide encodes a prime editor fusion protein comprising a DNA binding domain and a DNA polymerase domain. In some embodiments, the polynucleotide encodes a DNA polymerase domain of a prime editor. In some embodiments, the polynucleotide encodes a DNA polymerase domain of a prime editor. In some embodiments, the polynucleotide encodes a portion of a prime editor protein, for example, a N-terminal portion of a prime editor fusion protein connected to an intein-N. In some embodiments, the polynucleotide encodes a portion of a prime editor protein, for example, a C-terminal portion of a prime editor fusion protein connected to an intein-C. In some embodiments, the polynucleotide encodes a PEgRNA and/or a ngRNA. In some embodiments, the polypeptide encodes two or more components of a prime editing composition, for example, a prime editor fusion protein and a PEgRNA.

[0416] In some embodiments, the polynucleotide encoding one or more prime editing composition components is delivered to a target cell is integrated into the genome of the cell for long-term expression, for example, by a retroviral vector. In some embodiments, the polynucleotide delivered to a target cell is expressed transiently. For example, the polynucleotide may be delivered in the form of a mRNA, or a non-integrating vector (non-integrating virus, plasmids, minicircle DNAs) for episomal expression.

[0417] In some embodiments, a polynucleotide encoding one or more prime editing system components can be operably linked to a regulatory element, e.g., a transcriptional control element, such as a promoter. In some embodiments, the polynucleotide is operably linked to multiple control elements. Depending on the expression system utilized, any of a number of suitable transcription and translation control elements, including constitutive and inducible promoters, transcription enhancer elements, transcription terminators, etc. may be used in the expression vector (e.g., U6 promoter, H1 promoter).

[0418] In some embodiments, the polynucleotide encoding one or more prime editing composition components is a part of, or is encoded by, a vector. In some embodiments, the vector is a viral vector. In some embodiments, the vector is a non-viral vector.

[0419] Non-viral vector delivery systems can include DNA plasmids. RNA (e.g., a transcript of a vector described herein), naked nucleic acid, and nucleic acid complexed with a delivery vehicle, such as a liposome. In some embodiments, the polynucleotide is provided as an RNA, e.g., a mRNA or a transcript. Any RNA of the prime editing systems, for example a guide RNA or a base editor-encoding mRNA, can be delivered in the form of RNA. In some embodiments, one or more components of the prime editing system that are RNAs is produced by direct chemical synthesis or may be transcribed in vitro from a DNA. In some embodiments, a mRNA that encodes a prime editor polypeptide is generated using ii vitro transcription. Guide polynucleotides (e.g., PEgRNA or ngRNA) can also be transcribed using in vitro transcription from a cassette containing a T7 promoter, followed by the sequence “GG”, and guide polynucleotide sequence. In some embodiments, the prime editor encoding mRNA. PEgRNA, and/or ngRNA are synthesized in vitro using an RNA polymerase enzyme (e.g., T7 polymerase, T3 polymerase, SP6 polymerase, etc.). Once synthesized, the RNA can directly contact a target ATP7B gene or can be introduced into a cell using any suitable technique for introducing nucleic acids into cells (e.g., microinjection, electroporation, transfection). In some embodiments, the prime editor-coding sequences, the PEgRNAs, and/or the ngRNAs are modified to include one or more modified nucleoside e.g. using pseudo-U or 5-Methyl-C.

[0420] Methods of non-viral delivery of nucleic acids can include lipofection, nucleofection, microinjection, biolistics, virosomes, liposomes, immunoliposomes, polycation or lipid:nucleic acid conjugates, naked DNA, artificial virions, cell membrane disruption by a microfluidics device, and agent-enhanced uptake of DNA. Cationic and neutral lipids that are suitable for efficient receptor-recognition lipofection of polynucleotides can be used. Delivery can be to cells (e.g., in vitro or ex vivo administration) or target tissues (e.g., in vivo administration). The preparation of lipid:nucleic acid complexes, including targeted liposomes such as immunolipid complexes, can be used.

[0421] Viral vector delivery systems can include DNA and RNA viruses, which can have either episomal or integrated genomes after delivery to the cell. RNA or DNA viral based systems can be used to target specific cells and trafficking the viral payload to an organelle of the cell. Viral vectors can be administered directly (in vivo) or they can be used to treat cells in vitro, and the modified cells can optionally be administered (ex vivo).

[0422] In some embodiments, the viral vector is a retroviral, lentiviral, adenoviral, adeno-associated viral or herpes simplex viral vector. Retroviral vectors can include those based upon murine leukemia virus (MuLV), gibbon ape leukemia virus (GaLV), Simian Immuno deficiency virus (SIV), human immuno deficiency virus (HIV), and combinations thereof. In some embodiments, the retroviral vector is a lentiviral vector. In some embodiments, the retroviral vector is a gamma retroviral vector. In some embodiments, the viral vector is an adenoviral vector. In some embodiments, the viral vector is an adeno-associated virus (“AAV”) vector.

[0423] In some embodiments, polynucleotides encoding one or more prime editing composition components are packaged in a virus particle. Packaging cells can be used to form virus particles that can infect a target cell. Such cells can include 293 cells, (e.g., for packaging adenovirus), and .psi.2 cells or PA317 cells (e.g., for packaging retrovirus). Viral vectors can be generated by producing a cell line that packages a nucleic acid vector into a viral particle. The vectors can contain the minimal viral sequences required for packaging and subsequent integration into a host. The vectors can contain other viral sequences being replaced by an expression cassette for the polynucleotide(s) to be expressed. The missing viral functions can be supplied in trans by the packaging cell line. For example, AAV vectors can comprise ITR sequences from the AAV genome which are required for packaging and integration into the host genome.

[0424] In some embodiments, dual AAV vectors are generated by splitting a large transgene expression cassette in two separate halves (5′ and 3′ ends that encode N-terminal portion and C-terminal portion of, e.g., a prime editor polypeptide), where each half of the cassette is no more than 5 kb in length, optionally no more than 4.7 kb in length, and is packaged in a single AAV vector. In some embodiments, the full-length transgene expression cassette is reassembled upon co-infection of the same cell by both dual AAV vectors. In some embodiments, a portion or fragment of a prime editor polypeptide, e.g. a Cas9 nickase, is fused to an intein. The portion or fragment of the polypeptide can be fused to the N-terminus or the C-terminus of the intein. In some embodiments, a N-terminal portion of the polypeptide is fused to an intein-N, and a C-terminal portion of the polypeptide is separately fused to an intein-C. In some embodiments, a portion or fragment of a prime editor fusion protein is fused to an intein and fused to an AAV capsid protein. The intein, nuclease and capsid protein can be fused together in any arrangement (e.g., nuclease-intein-capsid, intein-nuclease-capsid, capsid-intein-nuclease, etc.). In some embodiments, a polynucleotide encoding a prime editor fusion protein is split in two separate halves, each encoding a portion of the prime editor fusion protein and separately fused to an intein. In some embodiments, each of the two halves of the polynucleotide is packaged in an individual AAV vector of a dual AAV vector system. In some embodiments, each of the two halves of the polynucleotide is no more than 5 kb in length, optionally no more than 4.7 kb in length. In some embodiments, the full-length prime editor fusion protein is reassembled upon co-infection of the same cell by both dual AAV vectors, expression of both halves of the prime editor fusion protein, and self-excision of the inteins.

[0425] A target cell can be transiently or non-transiently transfected with one or more vectors described herein. A cell can be transfected as it naturally occurs in a subject. A cell can be taken or derived from a subject and transfected. A cell can be derived from cells taken from a subject, such as a cell line. In some embodiments, a cell transfected with one or more vectors described herein can be used to establish a new cell line comprising one or more vector-derived sequences. In some embodiments, a cell transiently transfected with the compositions of the disclosure (such as by transient transfection of one or more vectors, or transfection with RNA), and modified through the activity of a prime editor, can be used to establish a new cell line comprising cells containing the modification but lacking any other exogenous sequence. Any suitable vector compatible with the host cell can be used with the methods of the disclosure. Non-limiting examples of vectors include pXT1, pSG5, pSVK3, pBPV, pMSG, and pSVLSV40.

[0426] In some embodiments, a prime editor protein can be provided to cells as a polypeptide. In some embodiments, the prime editor protein is fused to a polypeptide domain that increases solubility of the protein. In some embodiments, the prime editor protein is formulated to improve solubility of the protein.

[0427] In some embodiment, a prime editor polypeptide is fused to a polypeptide permeant domain to promote uptake by the cell. In some embodiments, the permeant domain is a including peptide, a peptidomimetic, or a non-peptide carrier. For example, a permeant peptide may be derived from the third alpha helix of Drosophila melanogaster transcription factor Antennapaedia, referred to as penetratin, which comprises the amino acid sequence RQIKIWFQNRRMKWKK (SEQ ID NO: 5897). As another example, the permeant peptide can comprise the HIV-1 tat basic region amino acid sequence, which may include, for example, amino acids 49-57 of naturally-occurring tat protein. Other permeant domains can include poly-arginine motifs, for example, the region of amino acids 34-56 of HIV-1 rev protein, nona-arginine (SEQ ID NO: 5898), and octa-arginine (SEQ ID NO: 5899). The nona-arginine (R9) sequence (SEQ ID NO: 5898) can be used. The site at which the fusion can be made may be selected in order to optimize the biological activity, secretion or binding characteristics of the polypeptide.

[0428] In some embodiments, a prime editor polypeptide is produced in vitro or by host cells, and it may be further processed by unfolding, e.g., heat denaturation, DTT reduction, etc. and may be further refolded. In some embodiments, a prime editor polypeptide is prepared by in vitro synthesis. Various commercial synthetic apparatuses can be used. By using synthesizers, naturally occurring amino acids can be substituted with unnatural amino acids. In some embodiments, a prime editor polypeptide is isolated and purified in accordance with recombinant synthesis methods, for example, by expression in a host cell and the lysate purified using HPLC, exclusion chromatography, gel electrophoresis, affinity chromatography, or other purification technique.

[0429] In some embodiments, a prime editing composition, for example, prime editor polypeptide components and PEgRNA/ngRNA are introduced to a target cell by nanoparticles. In some embodiments, the prime editor polypeptide components and the PEgRNA and/or ngRNA form a complex in the nanoparticle. Any suitable nanoparticle design can be used to deliver genome editing system components or nucleic acids encoding such components. In some embodiments, the nanoparticle is inorganic. In some embodiments, the nanoparticle is organic. In some embodiments, a prime editing composition is delivered to a target cell, e.g., a hepatocyte, in an organic nanoparticle, e.g. a lipid nanoparticle (LNP) or polymer nanoparticle.

[0430] In some embodiments, LNPs are formulated from cationic, anionic, neutral lipids, or combinations thereof. In some embodiments, neutral lipids, such as the fusogenic phospholipid DOPE or the membrane component cholesterol, are included to enhance transfection activity and nanoparticle stability. In some embodiments, LNPs are formulated with hydrophobic lipids, hydrophilic lipids, or combinations thereof. Lipids may be formulated in a wide range of molar ratios to produce an LNP. Any lipid or combination of lipids that are known in the art can be used to produce an LNP. Exemplary lipids used to produce LNPs are provided in Table 3 below.

[0431] In some embodiments, components of a prime editing composition form a complex prior to delivery to a target cell. For example, a prime editor fusion protein, a PEgRNA, and/or a ngRNA can form a complex prior to delivery to the target cell. In some embodiments, a prime editing polypeptide (e.g. a prime editor fusion protein) and a guide polynucleotide (e.g. a PEgRNA or ngRNA) form a ribonucleoprotein (RNP) for delivery to a target cell. In some embodiments, the RNP comprises a prime editor fusion protein in complex with a PEgRNA. RNPs may be delivered to cells using known methods, such as electroporation, nucleofection, or cationic lipid-mediated methods, or any other approaches known in the art. In some embodiments, delivery of a prime editing composition or complex to the target cell does not require the delivery of foreign DNA into the cell. In some embodiments, the RNP comprising the prime editing complex is degraded over time in the target cell. Exemplary lipids for use in nanoparticle formulations and/or gene transfer are shown in Table 3 below.

TABLE 3
Exemplary lipids for nanoparticle formulation or gene transfer

| Lipid | Abbreviation | Feature |
|---|---|---|
| 1,2-Dioleoyl-sn-glycero-3-phosphatidylcholine | DOPC | Helper |
| 1,2-Dioleoyl-sn-glycero-3-phosphatidylethanolamine | DOPE | Helper |
| Cholesterol | | Helper |
| N41-(2,3-Dioleyloxy)prophyliN,N,N-trimethylammonium | DOTMA | Cationic |
| chloride | | |
| 1,2-Dioleoyloxy-3-trimethylammonium-propane | DOGS | Cationic |
| Dioctadecylamidoglycylspermine | | |
| N-(3-Aminopropy1)-N,N-dimethy 1-2,3-bis(dodecyloxy)-1- | GAP-DLRIE | Cationic |
| propanaminium bromide | | |
| Cetyltrimethylammonium bromide | CTAB | Cationic |
| 6-Lauroxyhexyl omithinate | LHON | Cationic |
| 1-(2,3-Dioleoyloxypropy1)-2,4,6-trimethylpyridinium | 2Oc | Cationic |
| 2,3-Dioleyloxy-N-P(spenninecarboxamido-ethy1J-N,Ndimethyl- | DOSPA | Cationic |
| 1-propanatninium trifluoroacetate | | |
| 1,2-Dioley 1-3-trimethylamtnonium-propane | DOPA | Cationic |
| N-(2-Hydroxyethyl)-N,N-dimethy 1-2,3-bis(tetradecyloxy)-1- | MDRIE | Cationic |
| propanaminium bromide | | |
| Dimyristooxypropyl dimethyl hydroxyethyl ammonium bromide | DMRI | Cationic |
| 3β-[N-(N′,N′-Dimethylaminoethane)-carbamoyl]cholesterol | DC-Chol | Cationic |
| Bis-guanidium-tren-cholesterol | BGTC | Cationic |
| 1,3-Diodeoxy-2-(6-carboxy-spermy1)-propylamide | DOSPER | Cationic |
| Dimethyloctadecylammonium bromide | DDAB | Cationic |
| Dioctadecylamidoglicylspermidin | DSL | Cationic |
| rac-[(2,3-Dioctadecyloxypropyl)(2-hydroxyethyl)]- | CLIP-1 | Cationic |
| dimethylammonium chloride | | |
| rac-[2(2,3-Dihexadecyloxypropyloxymethyloxy) | CLIP-6 | Cationic |
| ethyl\|trimethylammoniun bromide | | |
| Ethyldimyristoylphosphatidylcholine | EDMPC | Cationic |
| 1,2-Distearyloxy-N,N-dimethyl-3-aminopropane | DSDMA | Cationic |
| 1,2-Dimyristoyl-trimethylammonium propane | DMTAP | Cationic |
| O,O′-Dimyristyl-N-lysyl aspartate | DMKE | Cationic |
| 1,2-Distearoyl-sn-glycero-3-ethylpho sphocholine | DSEPC | Cationic |
| N-Palmitoyl D-erythro-sphingosyl carbamoyl-spenmine | CCS | Cationic |
| N-t-Butyl-N0-tetradecy1-3-tetradecylaminopropionamidine | diC14-amidine | Cationic |
| Octadecenolyoxy[ethyl-2-heptadeceny1-3 hydroxyethyl] | DOTIM | Cationic |
| imidazolinium chloride | | |
| N1-Cholesteryloxycarbonyl-3,7-diazanonane-1,9-diamine | CDAN | Cationic |
| 2-(3-Bis(3-amino-propy1)-amino]propylamino)- | RPR209120 | Cationic |
| Nditetradecylcarbamoylme-ethyl-acetamide | | |
| 1,2-dilinoleyloxy-3-dimethylaminopropane | DLinDMA | Cationic |
| 2,2-dilinoley1-4-dimethylaminoethyl-[1,3]-dioxolane | DLin-KC2- | Cationic |
| | DMA | |
| dilinoleyl-methyl-4-dimethylaminobutyrate | DLin-MC3- | Cationic |
| | DMA | |

[0432] Exemplary polymers for use in nanoparticle formulations and/or gene transfer are shown in Table 4 below.

TABLE 4
Exemplary lipids for nanoparticle formulation or gene transfer

| Polymer | Abbreviation |
|---|---|
| Poly(ethylene)glycol | PEG |
| Polyethylenimine | PEI |
| Dithiobis (succinimidylpropionate) | DSP |
| Dimethyl-3,3′-dithiobispropionimidate | DTBP |
| Poly(ethyleneimine)biscarbamate | PEIC |
| Poly(L-lysine) | PLL |
| Histidine modified PLL | |
| Poly(N-vinylpyrrolidone) | PVP |
| Poly(propylenimine) | PPI |
| Poly(amidoamine) | PAMAM |
| Poly(amidoethylenimine) | SS_PAEI |
| Triethylenetetramine | TETA |
| Poly(β-aminoester) | |
| Poly(4-hydroxy-L-proline ester) | PHP |
| Poly(allylamine) | |
| Poly(α-[4-aminobutyl]-L-glycolic acid) | PAGA |
| Poly(D,L-lactic-co-glycolic acid) | PLGA |
| Poly(N-ethyl-4-vinylpyridinium bromide) | |
| Poly(phosphazene)s | PPZ |
| Poly(phosphoester)s | PPE |
| Poly(phosphoramidate)s | PPA |
| Poly(N-2-hydroxypropylmethacrylamide) | pHPMA |
| Poly (2-(dimethylamino)ethyl methacrylate) | pDMAEMA |
| Poly(2-aminoethyl propylene phosphate) | PPE-EA |
| Chitosan | |
| Galactosylated chitosan | |
| N-dodacylated chitosam | |
| Histone | |
| Collagen | |
| Dextran-spermine | D-SPM |

[0433] Exemplary delivery methods for polynucleotides encoding prime editing composition components are shown in Table 5 below.

TABLE 5
Exemplary polynucleotide delivery methods

| | | Delivery into | | | Type of |
|---|---|---|---|---|---|
| | | Non-Dividing | Duration of | Genome | Molecule |
| Delivery | Vector/Mode | Cells | Expression | Integration | Delivered |
| Physical | (e.g., | YES | Transient | NO | Nucleic Acids |
| | electroporation, | | | | and Proteins |
| | particle gun, | | | | |
| | Calcium phosphate | | | | |
| | transfection) | | | | |
| Viral | Retrovirus | NO | Stable | YES | RNA |
| | Lentivirus | YES | Stable | YES/NO with | RNA |
| | | | | modification | |
| | Adenovirus | YES | Transient | NO | DNA |
| | Adeno-Associated | YES | Stable | NO | DNA |
| | Virus (AAV) | | | | |
| | Vaccinia Virus | YES | Very Transient | NO | DNA |
| | Herpes Simplex | YES | Stable | NO | DNA |
| | Virus | | | | |
| Non-Viral | Cationic | YES | Transient | Depends on | Nucleic acids |
| | | | | what is | and Proteins |
| | | | | delivered | |
| | Polymeric | YES | Transient | NO | Nucleic Acids |
| | Nanoparticles | | | | |
| Biological | Attenuated Bacteria | YES | Transient | NO | Nucleic Acids |
| Non-Viral | Engineered | YES | Transient | NO | Nucleic Acids |
| Delivery | Bacteriophages | | | | |
| Vehicles | Mammalian Virus- | YES | Transient | NO | Nucleic Acids |
| | like Particles | | | | |
| | Biological | YES | Transient | NO | Nucleic Acids |
| | liposomes: | | | | |
| | Erythrocyte Ghosts | | | | |
| | and Exosomes | | | | |

[0434] The prime editing compositions of the disclosure, whether introduced as polynucleotides or polypeptides, can be provided to the cells for about 30 minutes to about 24 hours, e.g., 1 hour, 1.5 hours, 2 hours, 2.5 hours, 3 hours, 3.5 hours 4 hours, 5 hours, 6 hours, 7 hours, 8 hours, 12 hours, 16 hours, 18 hours, 20 hours, or any other period from about 30 minutes to about 24 hours, which can be repeated with a frequency of about every day to about every 4 days, e.g., every 1.5 days, every 2 days, every 3 days, or any other Frequency from about every day to about every four days. The compositions may be provided to the subject cells one or more times, e.g., one time, twice, three times, or more than three times, and the cells allowed to incubate with the agent(s) for some amount of time following each contacting event e.g., 16-24 hours. In cases in which two or more different prime editing system components, e.g., two different polynucleotide constructs are provided to the cell (e.g., different components of the same prim editing system, or two different guide nucleic acids that are complementary to different sequences within the same or different target genes), the compositions may be delivered simultaneously (e.g., as two polypeptides and/or nucleic acids). Alternatively, they may be provided sequentially, e.g., one composition being provided first, followed by a second composition.

[0435] The prime editing compositions and pharmaceutical compositions of the disclosure, whether introduced as polynucleotides or polypeptides, can be administered to subjects in need thereof for about 30 minutes to about 24 hours, e.g., 1 hour, 1.5 hours, 2 hours, 2.5 hours. 3 hours, 3.5 hours 4 hours, 5 hours, 6 hours, 7 hours, 8 hours, 12 hours, 16 hours, 18 hours, 20 hours, or any other period from about 30 minutes to about 24 hours, which can be repeated with a frequency of about every day to about every 4 days, e.g., every 1.5 days, every 2 days, every 3 days, or any other frequency from about every day to about every four days. The compositions may be provided to the subject one or more times, e.g., one time, twice, three times, or more than three times. In cases in which two or more different prime editing system components, e.g. two different polynucleotide constructs are administered to the subject (e.g., different components of the same prim editing system, or two different guide nucleic acids that are complementary to different sequences within the same or different target genes), the compositions may be administered simultaneously (e.g., as two polypeptides and/or nucleic acids). Alternatively, they may be provided sequentially, e.g., one composition being provided first, followed by a second composition.

### EXAMPLES

[0436] The following examples are provided for illustrative purposes only and are not intended to limit the scope of the claims provided herein.

### Example 1—General Methods

[0437] PEgRNA assembly: PEgRNA libraries are assembled by one of three methods: in the first method, pooled synthesized DNA oligos encoding the PEgRNA and flanking U6 expression plasmid homology regions are cloned into U6 expression plasmids via Gibson cloning and sequencing of bacterial colonies via Sanger or Next-generation sequencing. In the second method, double-stranded linear DNA fragments encoding PEgRNA and homology sequences as above are individually Gibson-cloned into U6 expression plasmids. In the third method, for each PEgRNA, separate oligos encoding a protospacer, a gRNA scaffold, and PEgRNA extension (PBS and RTT) are ligated, and then cloned into a U6 expression plasmid as described in Anzalone et al., Nature. 2019 December; 576(7785):149-157. Bacterial colonies carrying sequence-verified plasmids are propagated in LB or TB. Plasmid DNA is purified by minipreps for mammalian transfection.

[0438] Mammalian cell culture and transfection: HEK293T and Huh-7 cells are propagated in DMEM with 10% FBS. HepG2 cells are propagated in EMEM with 10% FBS. Cells are seeded in 96-well plates and then transfected with Lipofectamine 2000 according to the manufacturer's directions with DNA encoding a prime editor, PEgRNA, and (if applicable) ngRNA. Alternatively, cells are transfected with MessengerMax according to the manufacturer's directions with mRNA encoding a prime editor, synthetic PEgRNA, and (if applicable) ngRNA. Three days after transfection, gDNA is harvested in lysis buffer for high throughput sequencing and sequenced using miseq.

[0439] Lentiviral production and cell line generation: Lentiviral transfer plasmids containing the H1069Q mutation with flanking sequences from the ATP7B gene on each side, and an IRES-Puromycin selection cassette, are cloned behind an EF1α short promoter. HEK 293T cells are transiently transfected with the transfer plasmids and packaging plasmids containing VSV glycoprotein and lentiviral gag/pol coding sequences. After transfection, lentiviral particles are harvested from the cell media and concentrated. HEK 293T cells are transduced using serial dilutions of the lentiviral particles described above. Cells generated at a dilution of MOI<1, as determined by survival following puromycin, are selected for expansion. A resulting HEK293T cell line carrying the H1069Q mutation is used to screen PEgRNAs.

[0440] ATP7B H1069Q mutation installation: An ATP7B H1069Q mutation is installed at the endogenous ATP7B locus in HEK 293T, Huh-7, and HepG2 cells by prime editing and single-cell clones are obtained via limiting dilution and clonal expansion.

[0441] Prime Editing in primary human hepatocytes: Primary human hepatocytes are transduced with lentivirus encoding the H1069Q cassette 2 days after cryorecovery, followed 6 days later by transfection with RNA encoding a prime editor, PEgRNA, and (if applicable) ngRNA. Genomic DNA is harvested after a 1-week incubation.

### Example 2—Screen of Cas9 Cutting Activity at Spacers within 200 nt of the ATP7B H1069Q Mutation Site

[0442] A spacer screen was performed to investigate Cas9 cutting activity at sites within 200 nucleotides (nts) of the H1069Q mutation site in the ATP7B gene. HEK293T cells were cultured and transfected with mRNA encoding a Cas9 and synthetic sgRNA as described above. The results are shown in Table XA.

TABLE XA
Spacer screen for Cas9 cutting activity within 200
nt of the H1069Q mutation site in the ATP7B gene

| | | | | PAM Location |
|---|---|---|---|---|
| | Nick-to-edit | | | Relative to |
| Spacer¹ | distance to H1069 | | Percent | H1069Q Mutation |
| SEQ ID NO: | (nt)² | PAM | Indel³ | site⁴ |
| 5281 | −85 | NGA | +++ | 5′ |
| 738 | −78 | NGG | +++ | 5′ |
| 740 | −75 | NGG | ++ | 5′ |
| 736 | −74 | NGG | ++ | 5′ |
| 737 | −73 | NGG | ++ | 5′ |
| 529 | −72 | NGA | ++ | 5′ |
| 200 | −70 | NGG | + | 5′ |
| 199 | −69 | NGG | ++ | 5′ |
| 35 | −65 | NGG | + | 5′ |
| 55 | −64 | NGG | + | 5′ |
| 2090 | −51 | NGG | + | 3′ |
| 2063 | −46 | NGG | ++ | 3′ |
| 2048 | −45 | NGG | + | 3′ |
| 2066 | −40 | NGA | + | 3′ |
| 2051 | −39 | NGG | +++ | 3′ |
| 2045 | −32 | NGG | ++++ | 3′ |
| 2091 | −30 | NGA | +++ | 3′ |
| 45; 2023 | −27 | NGG | ++ | 5′ |
| 43 | −24 | NGA | + | 5′ |
| 33; 2293 | −9 | NGG | ++ | 5′ |
| 58; 4425 | −8 | NGG | +++ | 5′ |
| 53 | −7 | NGG | ++ | 5′ |
| 2076; 5248 | 9 | NGA | ++ | 5′ |
| 1505; 2055 | 19 | NGG | +++ | 5′ |
| 2081; 5228 | 21 | NGA | + | 5′ |
| 682; 2087 | 22 | NGG | + | 5′ |
| 2083; 5206 | 28 | NGA | + | 5′ |
| 483; 2061 | 29 | NGG | ++++ | 5′ |
| 294; 2070 | 30 | NGG | ++++ | 5′ |
| 182; 2080 | 31 | NGG | +++ | 5′ |
| 42 | 32 | NGA | + | 3′ |
| 1; 2058 | 34 | NGG | +++ | 5′ |
| 2069; 5555 | 40 | NGG | ++++ | 5′ |
| 39 | 42 | NGA | ++++ | 3′ |
| 70 | 44 | NGG | ++++ | 3′ |
| 68 | 45 | NGG | +++ | 3′ |
| 47 | 46 | NGG | ++++ | 3′ |
| 2057; 5706 | 46 | NGG | ++++ | 5′ |
| 2064 | 49 | NGA | + | 5′ |
| 2056; 5638 | 50 | NGG | +++ | 5′ |
| 32 | 54 | NGG | +++ | 3′ |
| 2068 | 67 | NGG | + | 5′ |
| 31 | 71 | NGG | +++ | 3′ |
| 40 | 72 | NGA | ++++ | 3′ |
| 2046 | 72 | NGA | + | 5′ |
| 2059 | 73 | NGG | ++ | 5′ |
| 2089 | 74 | NGG | +++ | 5′ |
| 2443 | 75 | NGG | ++ | 5′ |
| 2444 | 76 | NGG | +++ | 5′ |
| 20 | 84 | NGA | + | 3′ |
| 2437 | 88 | NGG | ++++ | 5′ |
| 2439 | 89 | NGG | ++++ | 5′ |
| 30 | 90 | NGG | +++ | 3′ |
| 27 | 91 | NGG | +++ | 3′ |
| 36 | 92 | NGG | +++ | 3′ |
| 21 | 93 | NGA | + | 3′ |
| 5536 | 97 | NGG | ++++ | 5′ |
| 69 | 98 | NGG | ++++ | 5′ |
| 50 | 101 | NGG | +++ | 3′ |
| 34 | 102 | NGG | ++ | 3′ |
| 62 | 108 | NGG | +++ | 5′ |
| 72 | 108 | NGG | ++ | 5′ |
| 65 | 123 | NGG | ++++ | 5′ |
| 5219 | 127 | NGA | + | 5′ |
| 5220 | 132 | NGA | + | 5′ |
| 5226 | 139 | NGA | ++ | 5′ |
| 5221 | 145 | NGA | + | 5′ |
| 5222 | 151 | NGA | + | 5′ |
| 41 | 155 | NGG | ++ | 5′ |
| 63 | 165 | NGG | ++++ | 5′ |
| 5223 | 166 | NGA | ++ | 3′ |
| 5227 | 172 | NGA | ++++ | 5′ |
| 5224 | 178 | NGA | ++ | 3′ |
| 64 | 179 | NGG | ++++ | 5′ |
| 66 | 181 | NGG | ++ | 3′ |
| 5225 | 182 | NGA | +++ | 3′ |
| 61 | 184 | NGG | ++++ | 3′ |
| 71 | 185 | NGG | ++++ | 3′ |
| 60 | 186 | NGG | ++++ | 3′ |

¹The indicated sequence sequences recite only the spacer; the sgRNA used experimentally contained the gRNA core of SEQ ID NO: 5957, a 3′ mU*mU*mU*U modification, and a 5′mN*mN*mN* modification, where m indicates that the indicated nucleotide contains a 2′-O— Me modification and a * indicates a phosphorothioate bond. Some spacers are identified by two SEQ ID NOs because the same spacer sequence was assigned a different SEQ ID NO in the cluster tables depending upon whether it was included as a ngRNA spacer or a PEgRNA spacer.
²A (+) nick-to-edit distance indicates the PAM is on the sense strand whereas a (−) nick-to-edit distance indicates the PAM is on the antisense strand.
³+ = 0.0%-3.3%; ++ = 3.3%-7.2%; +++ 7.2%-20%; ++++ = 20%-52.9%
⁴The indication of 5′ or 3′ refers to the position of the PAM relative to the H1069Q mutation site on the PAM strand in the ATP7B gene. The H1069Q mutation site may therefore refer to the sense or antisense strand, depending upon which strand contains the PAM sequence.

### Example 3—Prime Editing at a Lentivirus-Introduced ATP7B H1069Q Mutation Site in HEK293T Cells Using a PE2 System

[0443] Four exemplary PEgRNA spacers close to the H1069Q mutation are shown in FIG. 3A. In FIG. 3A, pegRNA spacer #1 corresponds to SEQ ID NO: 2293, pegRNA spacer #2 corresponds to SEQ ID NO: 4452, pegRNA spacer #3 corresponds to SEQ ID NO: 1505, and pegRNA spacer #4 corresponds to SEQ ID NO: 682. PEgRNA incorporating these spacers were designed and screened for Prime Editing efficiency in a HEK293T cell line containing a lentivirus-introduced H1069Q mutation. The cell line was generated as described in Example 1. These spacers were selected because they are close to the H1069Q mutation site and would produce a nick that is 5′ of the H1069Q mutation site when used in conjunction with a prime editor having a Cas9 protein containing an inactivating mutation in the HNH nuclease domain. Each of these spacers also showed at least some activity in the spacer screen of Example 2.

[0444] 375 PEgRNA were designed and screened in a PE2 system (i.e., without a ngRNA). In this initial screen, multiple primer binding site (PBS) and reverse transcription template (RTT) lengths were tested for each of the four exemplary spacers. All the PEgRNA were designed to restore the wild-type nucleic acid sequence at the H1069Q site. Where possible, additional PEgRNAs were designed that also introduce a silent mutation that destroys the PAM sequence (i.e., a PAM silencing mutation).

[0445] The results for individual PEgRNA are shown in Table XB. Successful Prime Editing was observed across PBS and RTT lengths, with and without PAM silencing. The percent editing observed for all PEgRNA having the same spacer were averaged, and the results reported in Table XC. The relative levels of Prime Editing observed between spacers is similar to the relative levels of Cas9 cutting for these spacers in the spacer screen of Example 2.

TABLE XB
PE2 Screen at H1069Q mutation site in HEK293T cells

| PEgRNA¹ | Spacer | RTT² | | PBS | | |
|---|---|---|---|---|---|---|
| SEQ ID | SEQ | SEQ | RTT | SEQ | PBS | Percent |
| NO: | ID NO: | ID NO: | Length | ID NO: | Length | Edit³ |
| 1565 | 1505; 2055 | 1518 | 21 | 1509 | 10 | +++ |
| 1564 | 1505; 2055 | 1517* | 21 | 1509 | 10 | + |
| 1569 | 1505; 2055 | 1519 | 22 | 1509 | 10 | ++++ |
| 1575 | 1505; 2055 | 1520* | 22 | 1509 | 10 | + |
| 1580 | 1505; 2055 | 1522 | 23 | 1509 | 10 | + |
| 1577 | 1505; 2055 | 1521* | 23 | 1509 | 10 | +++ |
| 1593 | 1505; 2055 | 1524 | 24 | 1509 | 10 | ++ |
| 1590 | 1505; 2055 | 1523* | 24 | 1509 | 10 | +++ |
| 1600 | 1505; 2055 | 1526 | 25 | 1509 | 10 | +++ |
| 1598 | 1505; 2055 | 1525* | 25 | 1509 | 10 | ++++ |
| 1578 | 1505; 2055 | 1518 | 21 | 1511 | 12 | +++ |
| 1586 | 1505; 2055 | 1517* | 21 | 1511 | 12 | + |
| 1591 | 1505; 2055 | 1519 | 22 | 1511 | 12 | +++ |
| 1587 | 1505; 2055 | 1520* | 22 | 1511 | 12 | +++ |
| 1609 | 1505; 2055 | 1522 | 23 | 1511 | 12 | ++ |
| 1607 | 1505; 2055 | 1521* | 23 | 1511 | 12 | +++ |
| 1616 | 1505; 2055 | 1524 | 24 | 1511 | 12 | ++++ |
| 1622 | 1505; 2055 | 1523* | 24 | 1511 | 12 | ++++ |
| 1643 | 1505; 2055 | 1526 | 25 | 1511 | 12 | +++ |
| 1637 | 1505; 2055 | 1525* | 25 | 1511 | 12 | ++++ |
| 1602 | 1505; 2055 | 1518 | 21 | 1513 | 14 | ++ |
| 1606 | 1505; 2055 | 1517* | 21 | 1513 | 14 | + |
| 1626 | 1505; 2055 | 1519 | 22 | 1513 | 14 | +++ |
| 1615 | 1505; 2055 | 1520* | 22 | 1513 | 14 | ++++ |
| 1628 | 1505; 2055 | 1522 | 23 | 1513 | 14 | +++ |
| 1645 | 1505; 2055 | 1521* | 23 | 1513 | 14 | ++ |
| 1664 | 1505; 2055 | 1524 | 24 | 1513 | 14 | ++ |
| 1668 | 1505; 2055 | 1523* | 24 | 1513 | 14 | +++ |
| 1671 | 1505; 2055 | 1526 | 25 | 1513 | 14 | ++ |
| 1679 | 1505; 2055 | 1525* | 25 | 1513 | 14 | ++++ |
| 1640 | 1505; 2055 | 1518 | 21 | 1515 | 16 | ++ |
| 1646 | 1505; 2055 | 1517* | 21 | 1515 | 16 | + |
| 1654 | 1505; 2055 | 1519 | 22 | 1515 | 16 | + |
| 1663 | 1505; 2055 | 1520* | 22 | 1515 | 16 | ++++ |
| 1691 | 1505; 2055 | 1522 | 23 | 1515 | 16 | + |
| 1678 | 1505; 2055 | 1521* | 23 | 1515 | 16 | ++ |
| 1708 | 1505; 2055 | 1524 | 24 | 1515 | 16 | ++ |
| 1694 | 1505; 2055 | 1523* | 24 | 1515 | 16 | +++ |
| 1725 | 1505; 2055 | 1526 | 25 | 1515 | 16 | ++++ |
| 1721 | 1505; 2055 | 1525* | 25 | 1515 | 16 | ++++ |
| 1550 | 1505; 2055 | 1518 | 21 | 1507 | 8 | +++ |
| 1551 | 1505; 2055 | 1517* | 21 | 1507 | 8 | +++ |
| 1554 | 1505; 2055 | 1519 | 22 | 1507 | 8 | +++ |
| 1553 | 1505; 2055 | 1520* | 22 | 1507 | 8 | ++ |
| 1562 | 1505; 2055 | 1522 | 23 | 1507 | 8 | + |
| 1566 | 1505; 2055 | 1521* | 23 | 1507 | 8 | +++ |
| 1570 | 1505; 2055 | 1524 | 24 | 1507 | 8 | ++ |
| 1567 | 1505; 2055 | 1523* | 24 | 1507 | 8 | ++ |
| 1583 | 1505; 2055 | 1526 | 25 | 1507 | 8 | ++ |
| 1584 | 1505; 2055 | 1525* | 25 | 1507 | 8 | ++ |
| 777 | 682; 2087 | 697 | 24 | 686 | 10 | + |
| 778 | 682; 2087 | 694* | 24 | 686 | 10 | + |
| 775 | 682; 2087 | 695* | 24 | 686 | 10 | + |
| 772 | 682; 2087 | 696* | 24 | 686 | 10 | + |
| 781 | 682; 2087 | 699 | 25 | 686 | 10 | + |
| 787 | 682; 2087 | 701* | 25 | 686 | 10 | + |
| 784 | 682; 2087 | 698* | 25 | 686 | 10 | + |
| 791 | 682; 2087 | 700* | 25 | 686 | 10 | + |
| 807 | 682; 2087 | 702 | 26 | 686 | 10 | + |
| 820 | 682; 2087 | 704* | 26 | 686 | 10 | + |
| 801 | 682; 2087 | 703* | 26 | 686 | 10 | + |
| 813 | 682; 2087 | 705* | 26 | 686 | 10 | + |
| 838 | 682; 2087 | 707 | 27 | 686 | 10 | ++ |
| 828 | 682; 2087 | 708* | 27 | 686 | 10 | +++ |
| 829 | 682; 2087 | 709* | 27 | 686 | 10 | ++ |
| 824 | 682; 2087 | 706* | 27 | 686 | 10 | ++ |
| 852 | 682; 2087 | 711 | 28 | 686 | 10 | +++ |
| 854 | 682; 2087 | 712* | 28 | 686 | 10 | ++ |
| 860 | 682; 2087 | 710* | 28 | 686 | 10 | +++ |
| 856 | 682; 2087 | 713* | 28 | 686 | 10 | ++ |
| 819 | 682; 2087 | 697 | 24 | 688 | 12 | + |
| 811 | 682; 2087 | 694* | 24 | 688 | 12 | + |
| 815 | 682; 2087 | 695* | 24 | 688 | 12 | + |
| 805 | 682; 2087 | 696* | 24 | 688 | 12 | + |
| 825 | 682; 2087 | 699 | 25 | 688 | 12 | + |
| 822 | 682; 2087 | 701* | 25 | 688 | 12 | + |
| 832 | 682; 2087 | 698* | 25 | 688 | 12 | + |
| 835 | 682; 2087 | 700* | 25 | 688 | 12 | + |
| 843 | 682; 2087 | 702 | 26 | 688 | 12 | + |
| 849 | 682; 2087 | 704* | 26 | 688 | 12 | + |
| 853 | 682; 2087 | 703* | 26 | 688 | 12 | + |
| 858 | 682; 2087 | 705* | 26 | 688 | 12 | +++ |
| 882 | 682; 2087 | 707 | 27 | 688 | 12 | ++ |
| 880 | 682; 2087 | 708* | 27 | 688 | 12 | ++ |
| 870 | 682; 2087 | 709* | 27 | 688 | 12 | ++ |
| 879 | 682; 2087 | 706* | 27 | 688 | 12 | ++ |
| 896 | 682; 2087 | 711 | 28 | 688 | 12 | + |
| 920 | 682; 2087 | 712* | 28 | 688 | 12 | +++ |
| 900 | 682; 2087 | 710* | 28 | 688 | 12 | ++ |
| 908 | 682; 2087 | 713* | 28 | 688 | 12 | ++ |
| 851 | 682; 2087 | 697 | 24 | 690 | 14 | + |
| 857 | 682; 2087 | 694* | 24 | 690 | 14 | + |
| 841 | 682; 2087 | 695* | 24 | 690 | 14 | + |
| 846 | 682; 2087 | 696* | 24 | 690 | 14 | + |
| 861 | 682; 2087 | 699 | 25 | 690 | 14 | ++ |
| 873 | 682; 2087 | 701* | 25 | 690 | 14 | + |
| 878 | 682; 2087 | 698* | 25 | 690 | 14 | + |
| 887 | 682; 2087 | 700* | 25 | 690 | 14 | + |
| 906 | 682; 2087 | 702 | 26 | 690 | 14 | + |
| 912 | 682; 2087 | 704* | 26 | 690 | 14 | + |
| 893 | 682; 2087 | 703* | 26 | 690 | 14 | + |
| 916 | 682; 2087 | 705* | 26 | 690 | 14 | + |
| 929 | 682; 2087 | 707 | 27 | 690 | 14 | + |
| 960 | 682; 2087 | 708* | 27 | 690 | 14 | ++ |
| 923 | 682; 2087 | 709* | 27 | 690 | 14 | ++ |
| 934 | 682; 2087 | 706* | 27 | 690 | 14 | + |
| 989 | 682; 2087 | 711 | 28 | 690 | 14 | +++ |
| 961 | 682; 2087 | 712* | 28 | 690 | 14 | +++ |
| 997 | 682; 2087 | 710* | 28 | 690 | 14 | ++ |
| 971 | 682; 2087 | 713* | 28 | 690 | 14 | ++ |
| 914 | 682; 2087 | 697 | 24 | 692 | 16 | + |
| 905 | 682; 2087 | 694* | 24 | 692 | 16 | + |
| 902 | 682; 2087 | 695* | 24 | 692 | 16 | + |
| 898 | 682; 2087 | 696* | 24 | 692 | 16 | + |
| 926 | 682; 2087 | 699 | 25 | 692 | 16 | + |
| 927 | 682; 2087 | 701* | 25 | 692 | 16 | 1 |
| 938 | 682; 2087 | 698* | 25 | 692 | 16 | + |
| 935 | 682; 2087 | 700* | 25 | 692 | 16 | + |
| 977 | 682; 2087 | 702 | 26 | 692 | 16 | ++ |
| 983 | 682; 2087 | 704* | 26 | 692 | 16 | + |
| 963 | 682; 2087 | 703* | 26 | 692 | 16 | + |
| 970 | 682; 2087 | 705* | 26 | 692 | 16 | + |
| 1041 | 682; 2087 | 707 | 27 | 692 | 16 | + |
| 1020 | 682; 2087 | 708* | 27 | 692 | 16 | ++ |
| 1043 | 682; 2087 | 709* | 27 | 692 | 16 | + |
| 1024 | 682; 2087 | 706* | 27 | 692 | 16 | + |
| 1074 | 682; 2087 | 711 | 28 | 692 | 16 | ++ |
| 1057 | 682; 2087 | 712* | 28 | 692 | 16 | ++ |
| 1068 | 682; 2087 | 710* | 28 | 692 | 16 | ++ |
| 1085 | 682; 2087 | 713* | 28 | 692 | 16 | +++ |
| 752 | 682; 2087 | 697 | 24 | 684 | 8 | + |
| 745 | 682; 2087 | 694* | 24 | 684 | 8 | + |
| 751 | 682; 2087 | 695* | 24 | 684 | 8 | + |
| 746 | 682; 2087 | 696 | 24 | 684 | 8 | + |
| 760 | 682; 2087 | 699 | 25 | 684 | 8 | + |
| 758 | 682; 2087 | 701* | 25 | 684 | 8 | + |
| 756 | 682; 2087 | 698* | 25 | 684 | 8 | + |
| 761 | 682; 2087 | 700* | 25 | 684 | 8 | + |
| 765 | 682; 2087 | 702 | 26 | 684 | 8 | + |
| 767 | 682; 2087 | 704* | 26 | 684 | 8 | + |
| 770 | 682; 2087 | 703* | 26 | 684 | 8 | + |
| 780 | 682; 2087 | 705* | 26 | 684 | 8 | + |
| 783 | 682; 2087 | 707 | 27 | 684 | 8 | + |
| 796 | 682; 2087 | 708* | 27 | 684 | 8 | ++ |
| 790 | 682; 2087 | 709* | 27 | 684 | 8 | + |
| 789 | 682; 2087 | 706* | 27 | 684 | 8 | + |
| 804 | 682; 2087 | 711 | 28 | 684 | 8 | ++ |
| 812 | 682; 2087 | 712* | 28 | 684 | 8 | +++ |
| 809 | 682; 2087 | 710* | 28 | 684 | 8 | + |
| 816 | 682; 2087 | 713* | 28 | 684 | 8 | ++ |
| 4507 | 58; 4425 | 4438 | 10 | 4429 | 10 | +++ |
| 4527 | 58; 4425 | 4441 | 12 | 4429 | 10 | ++++ |
| 4533 | 58; 4425 | 4444 | 13 | 4429 | 10 | ++++ |
| 4555 | 58; 4425 | 4446 | 14 | 4429 | 10 | ++ |
| 4564 | 58; 4425 | 4448 | 15 | 4429 | 10 | + |
| 4649 | 58; 4425 | 4452 | 18 | 4429 | 10 | ++++ |
| 4756 | 58; 4425 | 4456 | 21 | 4429 | 10 | ++++ |
| 4519 | 58; 4425 | 4438 | 10 | 4431 | 12 | ++++ |
| 4542 | 58; 4425 | 4440 | 11 | 4431 | 12 | ++++ |
| 4559 | 58; 4425 | 4441 | 12 | 4431 | 12 | ++ |
| 4576 | 58; 4425 | 4444 | 13 | 4431 | 12 | ++++ |
| 4588 | 58; 4425 | 4446 | 14 | 4431 | 12 | + |
| 4624 | 58; 4425 | 4448 | 15 | 4431 | 12 | + |
| 4679 | 58; 4425 | 4450 | 17 | 4431 | 12 | ++++ |
| 4697 | 58; 4425 | 4452 | 18 | 4431 | 12 | ++ |
| 4817 | 58; 4425 | 4456 | 21 | 4431 | 12 | ++++ |
| 4553 | 58; 4425 | 4438 | 10 | 4433 | 14 | +++ |
| 4562 | 58; 4425 | 4440 | 11 | 4433 | 14 | ++ |
| 4592 | 58; 4425 | 4441 | 12 | 4433 | 14 | ++++ |
| 4640 | 58; 4425 | 4446 | 14 | 4433 | 14 | ++++ |
| 4691 | 58; 4425 | 4448 | 15 | 4433 | 14 | ++++ |
| 4726 | 58; 4425 | 4450 | 17 | 4433 | 14 | ++++ |
| 4761 | 58; 4425 | 4452 | 18 | 4433 | 14 | ++++ |
| 4852 | 58; 4425 | 4456 | 21 | 4433 | 14 | ++++ |
| 4629 | 58; 4425 | 4440 | 11 | 4435 | 16 | ++ |
| 4653 | 58; 4425 | 4441 | 12 | 4435 | 16 | ++++ |
| 4668 | 58; 4425 | 4444 | 13 | 4435 | 16 | ++++ |
| 4724 | 58; 4425 | 4446 | 14 | 4435 | 16 | ++ |
| 4738 | 58; 4425 | 4448 | 15 | 4435 | 16 | + |
| 4809 | 58; 4425 | 4450 | 17 | 4435 | 16 | +++ |
| 4840 | 58; 4425 | 4452 | 18 | 4435 | 16 | +++ |
| 4893 | 58; 4425 | 4456 | 21 | 4435 | 16 | ++++ |
| 4500 | 58; 4425 | 4440 | 11 | 4427 | 8 | ++++ |
| 4504 | 58; 4425 | 4441 | 12 | 4427 | 8 | + |
| 4517 | 58; 4425 | 4444 | 13 | 4427 | 8 | +++ |
| 4522 | 58; 4425 | 4446 | 14 | 4427 | 8 | ++++ |
| 4540 | 58; 4425 | 4448 | 15 | 4427 | 8 | ++++ |
| 4580 | 58; 4425 | 4450 | 17 | 4427 | 8 | ++++ |
| 4591 | 58; 4425 | 4452 | 18 | 4427 | 8 | ++++ |
| 2480 | 33; 2293 | 2307 | 11 | 2297 | 10 | +++ |
| 2478 | 33; 2293 | 2308* | 11 | 2297 | 10 | + |
| 2487 | 33; 2293 | 2310* | 11 | 2297 | 10 | ++ |
| 2488 | 33; 2293 | 2306* | 11 | 2297 | 10 | ++ |
| 2510 | 33; 2293 | 2313 | 12 | 2297 | 10 | ++++ |
| 2514 | 33; 2293 | 2312* | 12 | 2297 | 10 | + |
| 2513 | 33; 2293 | 2311* | 12 | 2297 | 10 | ++ |
| 2493 | 33; 2293 | 2316* | 12 | 2297 | 10 | ++ |
| 2533 | 33; 2293 | 2320 | 13 | 2297 | 10 | ++++ |
| 2520 | 33; 2293 | 2318* | 13 | 2297 | 10 | ++ |
| 2531 | 33; 2293 | 2321* | 13 | 2297 | 10 | + |
| 2527 | 33; 2293 | 2319* | 13 | 2297 | 10 | +++ |
| 2559 | 33; 2293 | 2326 | 14 | 2297 | 10 | +++ |
| 2553 | 33; 2293 | 2324* | 14 | 2297 | 10 | ++ |
| 2561 | 33; 2293 | 2328* | 14 | 2297 | 10 | +++ |
| 2571 | 33; 2293 | 2325* | 14 | 2297 | 10 | ++++ |
| 2605 | 33; 2293 | 2329 | 15 | 2297 | 10 | +++ |
| 2618 | 33; 2293 | 2333* | 15 | 2297 | 10 | |
| 2615 | 33; 2293 | 2334* | 15 | 2297 | 10 | ++++ |
| 2598 | 33; 2293 | 2332* | 15 | 2297 | 10 | +++ |
| 2633 | 33; 2293 | 2335 | 16 | 2297 | 10 | ++++ |
| 2632 | 33; 2293 | 2338* | 16 | 2297 | 10 | +++ |
| 2645 | 33; 2293 | 2339* | 16 | 2297 | 10 | ++++ |
| 2634 | 33; 2293 | 2337* | 16 | 2297 | 10 | +++ |
| 2769 | 33; 2293 | 2342 | 18 | 2297 | 10 | ++++ |
| 2773 | 33; 2293 | 2346* | 18 | 2297 | 10 | ++ |
| 2772 | 33; 2293 | 2343* | 18 | 2297 | 10 | +++ |
| 2765 | 33; 2293 | 2344* | 18 | 2297 | 10 | +++ |
| 2801 | 33; 2293 | 2351 | 19 | 2297 | 10 | ++++ |
| 2829 | 33; 2293 | 2347* | 19 | 2297 | 10 | ++ |
| 2826 | 33; 2293 | 2348* | 19 | 2297 | 10 | +++ |
| 2807 | 33; 2293 | 2352* | 19 | 2297 | 10 | +++ |
| 2983 | 33; 2293 | 2353 | 22 | 2297 | 10 | +++ |
| 3023 | 33; 2293 | 2356* | 22 | 2297 | 10 | ++ |
| 3012 | 33; 2293 | 2355* | 22 | 2297 | 10 | +++ |
| 2977 | 33; 2293 | 2358* | 22 | 2297 | 10 | +++ |
| 2522 | 33; 2293 | 2307 | 11 | 2299 | 12 | +++ |
| 2528 | 33; 2293 | 2308* | 11 | 2299 | 12 | ++ |
| 2526 | 33; 2293 | 2310* | 11 | 2299 | 12 | ++ |
| 2544 | 33; 2293 | 2306* | 11 | 2299 | 12 | ++++ |
| 2575 | 33; 2293 | 2313 | 12 | 2299 | 12 | ++++ |
| 2562 | 33; 2293 | 2312* | 12 | 2299 | 12 | ++ |
| 2554 | 33; 2293 | 2311* | 12 | 2299 | 12 | ++ |
| 2563 | 33; 2293 | 2316* | 12 | 2299 | 12 | ++ |
| 2585 | 33; 2293 | 2320 | 13 | 2299 | 12 | ++++ |
| 2596 | 33; 2293 | 2318* | 13 | 2299 | 12 | + |
| 2610 | 33; 2293 | 2321* | 13 | 2299 | 12 | ++ |
| 2590 | 33; 2293 | 2319* | 13 | 2299 | 12 | +++ |
| 2628 | 33; 2293 | 2326 | 14 | 2299 | 12 | ++++ |
| 2646 | 33; 2293 | 2324* | 14 | 2299 | 12 | + |
| 2643 | 33; 2293 | 2328* | 14 | 2299 | 12 | +++ |
| 2665 | 33; 2293 | 2325* | 14 | 2299 | 12 | +++ |
| 2667 | 33; 2293 | 2329 | 15 | 2299 | 12 | ++++ |
| 2699 | 33; 2293 | 2333* | 15 | 2299 | 12 | ++ |
| 2701 | 33; 2293 | 2334* | 15 | 2299 | 12 | +++ |
| 2674 | 33; 2293 | 2332* | 15 | 2299 | 12 | +++ |
| 2744 | 33; 2293 | 2335 | 16 | 2299 | 12 | ++++ |
| 2734 | 33; 2293 | 2338* | 16 | 2299 | 12 | ++ |
| 2735 | 33; 2293 | 2339* | 16 | 2299 | 12 | +++ |
| 2733 | 33; 2293 | 2337* | 16 | 2299 | 12 | ++++ |
| 2886 | 33; 2293 | 2342 | 18 | 2299 | 12 | ++++ |
| 2899 | 33; 2293 | 2346* | 18 | 2299 | 12 | +++ |
| 2885 | 33; 2293 | 2343* | 18 | 2299 | 12 | +++ |
| 2890 | 33; 2293 | 2344* | 18 | 2299 | 12 | ++++ |
| 2916 | 33; 2293 | 2351 | 19 | 2299 | 12 | ++++ |
| 2941 | 33; 2293 | 2347* | 19 | 2299 | 12 | ++ |
| 2960 | 33; 2293 | 2348* | 19 | 2299 | 12 | +++ |
| 2962 | 33; 2293 | 2352* | 19 | 2299 | 12 | +++ |
| 3163 | 33; 2293 | 2353 | 22 | 2299 | 12 | +++ |
| 3122 | 33; 2293 | 2356* | 22 | 2299 | 12 | +++ |
| 3188 | 33; 2293 | 2355* | 22 | 2299 | 12 | +++ |
| 3166 | 33; 2293 | 2358* | 22 | 2299 | 12 | +++ |
| 2606 | 33; 2293 | 2307 | 11 | 2301 | 14 | ++ |
| 2602 | 33; 2293 | 2308* | 11 | 2301 | 14 | + |
| 2609 | 33; 2293 | 2310* | 11 | 2301 | 14 | ++ |
| 2584 | 33; 2293 | 2306* | 11 | 2301 | 14 | ++ |
| 2623 | 33; 2293 | 2313 | 12 | 2301 | 14 | ++++ |
| 2647 | 33; 2293 | 2312* | 12 | 2301 | 14 | ++ |
| 2660 | 33; 2293 | 2311* | 12 | 2301 | 14 | ++ |
| 2619 | 33; 2293 | 2316* | 12 | 2301 | 14 | +++ |
| 2675 | 33; 2293 | 2320 | 13 | 2301 | 14 | ++++ |
| 2677 | 33; 2293 | 2318* | 13 | 2301 | 14 | ++ |
| 2685 | 33; 2293 | 2321* | 13 | 2301 | 14 | ++ |
| 2670 | 33; 2293 | 2319* | 13 | 2301 | 14 | +++ |
| 2729 | 33; 2293 | 2326 | 14 | 2301 | 14 | ++++ |
| 2749 | 33; 2293 | 2324* | 14 | 2301 | 14 | ++ |
| 2764 | 33; 2293 | 2328* | 14 | 2301 | 14 | +++ |
| 2730 | 33; 2293 | 2325* | 14 | 2301 | 14 | +++ |
| 2802 | 33; 2293 | 2329 | 15 | 2301 | 14 | ++++ |
| 2816 | 33; 2293 | 2333* | 15 | 2301 | 14 | +++ |
| 2777 | 33; 2293 | 2334* | 15 | 2301 | 14 | ++++ |
| 2832 | 33; 2293 | 2332* | 15 | 2301 | 14 | ++++ |
| 2898 | 33; 2293 | 2335 | 16 | 2301 | 14 | ++++ |
| 2834 | 33; 2293 | 2338* | 16 | 2301 | 14 | +++ |
| 2893 | 33; 2293 | 2339* | 16 | 2301 | 14 | ++++ |
| 2889 | 33; 2293 | 2337* | 16 | 2301 | 14 | ++++ |
| 3043 | 33; 2293 | 2342 | 18 | 2301 | 14 | ++++ |
| 3013 | 33; 2293 | 2346* | 18 | 2301 | 14 | ++ |
| 3015 | 33; 2293 | 2343* | 18 | 2301 | 14 | ++++ |
| 2982 | 33; 2293 | 2344* | 18 | 2301 | 14 | ++++ |
| 3076 | 33; 2293 | 2351 | 19 | 2301 | 14 | ++++ |
| 3071 | 33; 2293 | 2347* | 19 | 2301 | 14 | +++ |
| 3080 | 33; 2293 | 2348* | 19 | 2301 | 14 | ++++ |
| 3072 | 33; 2293 | 2352* | 19 | 2301 | 14 | ++++ |
| 3287 | 33; 2293 | 2353 | 22 | 2301 | 14 | +++ |
| 3275 | 33; 2293 | 2356* | 22 | 2301 | 14 | ++ |
| 3301 | 33; 2293 | 2355* | 22 | 2301 | 14 | +++ |
| 3300 | 33; 2293 | 2358* | 22 | 2301 | 14 | +++ |
| 2683 | 33; 2293 | 2307 | 11 | 2303 | 16 | ++++ |
| 2711 | 33; 2293 | 2308* | 11 | 2303 | 16 | + |
| 2680 | 33; 2293 | 2310* | 11 | 2303 | 16 | ++ |
| 2702 | 33; 2293 | 2306* | 11 | 2303 | 16 | ++++ |
| 2758 | 33; 2293 | 2313 | 12 | 2303 | 16 | ++++ |
| 2760 | 33; 2293 | 2312* | 12 | 2303 | 16 | ++ |
| 2759 | 33; 2293 | 2311* | 12 | 2303 | 16 | ++ |
| 2757 | 33; 2293 | 2316* | 12 | 2303 | 16 | ++ |
| 2825 | 33; 2293 | 2320 | 13 | 2303 | 16 | +++ |
| 2830 | 33; 2293 | 2318* | 13 | 2303 | 16 | ++ |
| 2814 | 33; 2293 | 2321* | 13 | 2303 | 16 | ++ |
| 2800 | 33; 2293 | 2319* | 13 | 2303 | 16 | + |
| 2844 | 33; 2293 | 2326 | 14 | 2303 | 16 | ++++ |
| 2842 | 33; 2293 | 2324* | 14 | 2303 | 16 | ++++ |
| 2843 | 33; 2293 | 2328* | 14 | 2303 | 16 | +++ |
| 2841 | 33; 2293 | 2325* | 14 | 2303 | 16 | +++ |
| 2932 | 33; 2293 | 2329 | 15 | 2303 | 16 | ++++ |
| 2926 | 33; 2293 | 2333* | 15 | 2303 | 16 | ++++ |
| 2964 | 33; 2293 | 2334* | 15 | 2303 | 16 | +++ |
| 2933 | 33; 2293 | 2332* | 15 | 2303 | 16 | +++ |
| 2993 | 33; 2293 | 2335 | 16 | 2303 | 16 | ++++ |
| 2972 | 33; 2293 | 2338* | 16 | 2303 | 16 | ++ |
| 2988 | 33; 2293 | 2339* | 16 | 2303 | 16 | ++++ |
| 2979 | 33; 2293 | 2337* | 16 | 2303 | 16 | +++ |
| 3144 | 33; 2293 | 2342 | 18 | 2303 | 16 | +++ |
| 3148 | 33; 2293 | 2346* | 18 | 2303 | 16 | ++ |
| 3123 | 33; 2293 | 2343* | 18 | 2303 | 16 | ++++ |
| 3165 | 33; 2293 | 2344* | 18 | 2303 | 16 | ++++ |
| 3263 | 33; 2293 | 2351 | 19 | 2303 | 16 | ++++ |
| 3200 | 33; 2293 | 2347* | 19 | 2303 | 16 | ++ |
| 3248 | 33; 2293 | 2348* | 19 | 2303 | 16 | + |
| 3210 | 33; 2293 | 2352* | 19 | 2303 | 16 | +++ |
| 3441 | 33; 2293 | 2353 | 22 | 2303 | 16 | ++++ |
| 3420 | 33; 2293 | 2356* | 22 | 2303 | 16 | ++ |
| 3430 | 33; 2293 | 2355* | 22 | 2303 | 16 | +++ |
| 3442 | 33; 2293 | 2358* | 22 | 2303 | 16 | +++ |
| 2453 | 33; 2293 | 2307 | 11 | 2295 | 8 | ++ |
| 2451 | 33; 2293 | 2308* | 11 | 2295 | 8 | + |
| 2458 | 33; 2293 | 2310* | 11 | 2295 | 8 | +++ |
| 2457 | 33; 2293 | 2306* | 11 | 2295 | 8 | ++++ |
| 2459 | 33; 2293 | 2313 | 12 | 2295 | 8 | ++++ |
| 2460 | 33; 2293 | 2312* | 12 | 2295 | 8 | ++++ |
| 2466 | 33; 2293 | 2311* | 12 | 2295 | 8 | ++ |
| 2461 | 33; 2293 | 2316* | 12 | 2295 | 8 | ++ |
| 2489 | 33; 2293 | 2320 | 13 | 2295 | 8 | ++++ |
| 2473 | 33; 2293 | 2318* | 13 | 2295 | 8 | ++ |
| 2490 | 33; 2293 | 2321* | 13 | 2295 | 8 | ++++ |
| 2484 | 33; 2293 | 2319* | 13 | 2295 | 8 | +++ |
| 2515 | 33; 2293 | 2326 | 14 | 2295 | 8 | ++++ |
| 2501 | 33; 2293 | 2324* | 14 | 2295 | 8 | ++ |
| 2512 | 33; 2293 | 2328* | 14 | 2295 | 8 | +++ |
| 2509 | 33; 2293 | 2325* | 14 | 2295 | 8 | +++ |
| 2548 | 33; 2293 | 2329 | 15 | 2295 | 8 | ++++ |
| 2535 | 33; 2293 | 2333* | 15 | 2295 | 8 | ++ |
| 2546 | 33; 2293 | 2334* | 15 | 2295 | 8 | +++ |
| 2541 | 33; 2293 | 2332* | 15 | 2295 | 8 | +++ |
| 2557 | 33; 2293 | 2335 | 16 | 2295 | 8 | ++++ |
| 2564 | 33; 2293 | 2338* | 16 | 2295 | 8 | ++ |
| 2568 | 33; 2293 | 2339* | 16 | 2295 | 8 | ++++ |
| 2551 | 33; 2293 | 2337* | 16 | 2295 | 8 | +++ |
| 2637 | 33; 2293 | 2342 | 18 | 2295 | 8 | ++++ |
| 2635 | 33; 2293 | 2346* | 18 | 2295 | 8 | ++ |
| 2638 | 33; 2293 | 2343* | 18 | 2295 | 8 | +++ |
| 2636 | 33; 2293 | 2344* | 18 | 2295 | 8 | +++ |
| 2689 | 33; 2293 | 2351 | 19 | 2295 | 8 | ++++ |
| 2669 | 33; 2293 | 2347* | 19 | 2295 | 8 | ++ |
| 2690 | 33; 2293 | 2348* | 19 | 2295 | 8 | ++++ |
| 2706 | 33; 2293 | 2352* | 19 | 2295 | 8 | ++++ |
| 2871 | 33; 2293 | 2353 | 22 | 2295 | 8 | ++++ |
| 2856 | 33; 2293 | 2356* | 22 | 2295 | 8 | ++ |
| 2891 | 33; 2293 | 2355* | 22 | 2295 | 8 | +++ |
| 2894 | 33; 2293 | 2358* | 22 | 2295 | 8 | +++ |

¹Indicated PEgRNA sequence does not contain the adaptations for transcription from a DNA template used experimentally (i.e., addition of a 5'G if the spacer did not already start with a G and addition of 1-6 3'U from the U6 transcription termination sequence).
²* = RTT contains a PAM silencing mutation
³+ = 0.4%-3.3%; ++ = 3.3%-7.2%; +++ 7.2%-20%; ++++ = 20%-52.9%

TABLE XC
Average Percent Edit by Spacer in PE2 Screen
at H1069Q mutation site in HEK293T cells

| Spacer | |
|---|---|
| SEQ ID NO: | Avg. % Edit¹ |
| 1505; 2055 | +++ |
| 682; 2087 | + |
| 58; 4425 | ++++ |
| 33; 2293 | +++ |

¹+ = 0.4%-3.3%; ++ = 3.3%-7.2%; +++ 7.2%-20%; ++++ = 20%-52.9%

[0446] A subset of the PEgRNAs from Table XB were further examined for indels, the results of which are shown in Table XC. Indel frequency was quantified using standard quantification techniques via CRISPResso2 algorithm as described in Clement, K. et al., Nat. Biotechnol. 37, 224-226 (2019), with the quantification window defined as at least 20 bases 5′ and 3′ of pegRNA and ngRNA nick site.

TABLE XD
PE2 screen at the H1069 mutation site in HEK293T cells

| PEgRNA¹ | | RTT² | | PBS | | | |
|---|---|---|---|---|---|---|---|
| SEQ ID | Spacer | SEQ ID | RTT | SEQ ID | PBS | | |
| NO: | SEQ ID NO: | NO: | Length | NO: | Length | % Edit³ | % Indel³ |
| 2557 | 33; 2293 | 2335 | 16 | 2295 | 8 | ++++ | + |
| 2568 | 33; 2293 | 2339* | 16 | 2295 | 8 | ++++ | ++ |
| 2871 | 33; 2293 | 2353 | 22 | 2295 | 8 | +++ | ++ |
| 2533 | 33; 2293 | 2320 | 13 | 2297 | 10 | ++++ | ++ |
| 2615 | 33; 2293 | 2334* | 15 | 2297 | 10 | ++++ | ++ |
| 2633 | 33; 2293 | 2335 | 16 | 2297 | 10 | +++ | + |
| 2585 | 33; 2293 | 2320 | 13 | 2299 | 12 | ++++ | ++ |
| 2667 | 33; 2293 | 2329 | 15 | 2299 | 12 | ++ | ++ |
| 2744 | 33; 2293 | 2335 | 16 | 2299 | 12 | +++ | + |
| 2890 | 33; 2293 | 2344* | 18 | 2299 | 12 | +++ | + |
| 2675 | 33; 2293 | 2320 | 13 | 2301 | 14 | ++++ | ++ |
| 2729 | 33; 2293 | 2326 | 14 | 2301 | 14 | ++++ | ++ |
| 2898 | 33; 2293 | 2335 | 16 | 2301 | 14 | +++ | ++ |
| 3165 | 33; 2293 | 2344* | 18 | 2303 | 16 | ++++ | ++ |
| 2802 | 33; 2293 | 2329 | 15 | 2301 | 14 | ++++ | + |
| 4540 | 58; 4425 | 4448 | 15 | 4427 | 8 | +++ | + |
| 4533 | 58; 4425 | 4444 | 13 | 4429 | 10 | ++++ | + |
| 4756 | 58; 4425 | 4456 | 21 | 4429 | 10 | +++ | + |
| 4624 | 58; 4425 | 4448 | 15 | 4431 | 12 | ++++ | + |
| 4592 | 58; 4425 | 4441 | 12 | 4433 | 14 | ++++ | + |
| 4640 | 58; 4425 | 4446 | 14 | 4433 | 14 | ++++ | + |
| 4691 | 58; 4425 | 4448 | 15 | 4433 | 14 | ++++ | + |
| 4852 | 58; 4425 | 4456 | 21 | 4433 | 14 | +++ | + |
| 4761 | 58; 4425 | 4452 | 18 | 4433 | 14 | ++++ | + |
| 1622 | 1505; 2055 | 1523 | 24 | 1511 | 12 | +++ | ++ |
| 1615 | 1505; 2055 | 1520 | 22 | 1513 | 14 | ++++ | ++ |
| 1663 | 1505; 2055 | 1520 | 22 | 1515 | 16 | +++ | +++ |
| 1721 | 1505; 2055 | 1525 | 25 | 1515 | 16 | +++ | ++ |

¹Indicated PEgRNA sequence does not contain the adaptations for transcription from a DNA template used experimentally (i.e., addition of a 5′G if the spacer did not already start with a G and addition of 1-6 3′U from the U6 transcription termination sequence).
²* = RTT contains a PAM silencing mutation
³+ = 0.3%-3.4%; ++ = 3.4%-13.5%; +++ = 13.5%-23.0%; ++++ = 23.0%-36.0%

### Example 4—Prime Editing at the Endogenous ATP7B H1069Q Mutation Site in HEK293T Cells Using a PE3 System

[0447] An ATP7B H1069Q mutation was installed at the endogenous ATP7B locus in HEK 293T cells by prime editing and single-cell clones were obtained via limiting dilution and clonal expansion. A PE3 screen measuring correction and indel formation was performed at the endogenous ATP7B H1069Q locus. The HEK293T cells were transfected with DNA encoding a prime editor, PEgRNA, and ngRNA, as described in Example 1.

[0448] The results of the PE3 screen are provided in Tables XEa-XEd. Below each of Tables XEa-XEd is a table summarizing the PEgRNAs used experimentally. Each of the PEgRNA were tested in combination with multiple ngRNA. Some of the ngRNA were designed for a PE3B strategy and contain spacers complementary to the portion of the edit strand containing the edit. These results demonstrate the successful correction of the H1069Q mutation at the endogenous ATP7B locus in mammalian cells using both PE3 and PE3B Prime Editing systems.

TABLE XEa
PE3 screen at the H1069 mutation site in HEK293T cells

| | | PEgRNA² SEQ ID NO: | | | | | | | | | |
|---|---|---|---|---|---|---|---|---|---|---|---|
| | | 2557 | | 2568 | | 2871 | | 2533 | | 2615 | |
| | | % | % | % | % | % | % | % | % | % | % |
| | | Edit¹ | indel¹ | Edit¹ | indel¹ | Edit¹ | indel¹ | Edit¹ | indel¹ | Edit¹ | indel¹ |
| ngRNA² | PE2 | ++++ | + | ++++ | + | +++ | + | ++++ | ++ | ++++ | + |
| SEQ | 2263 | ++ | ++ | + | + | + | ++ | ++ | + | ++ | ++ |
| ID | 2266 | ++++ | ++ | + | + | ++ | ++ | +++ | + | +++ | + |
| NO: | 2276 | +++ | ++++ | ++ | ++ | + | + | + | + | ++ | +++ |
| | 2277 | ++++ | +++ | ++ | ++ | + | ++ | +++ | ++ | ++++ | ++ |
| | 2259 | ++++ | +++ | +++ | ++ | + | ++ | ++++ | ++ | ++++ | ++ |
| | 2257 | +++ | ++ | X | X | + | + | ++++ | ++ | X | X |
| | 2268 | +++ | +++ | X | X | ++ | ++ | +++ | ++ | X | X |
| | 2264 | ++++ | + | X | X | ++ | ++ | ++++ | + | X | X |
| | 2275 | ++++ | ++ | +++ | ++ | ++ | ++ | ++++ | ++ | +++ | + |
| | 2273 | ++++ | ++++ | ++ | ++ | + | + | ++++ | +++ | ++++ | ++ |
| | 2271 | ++++ | ++++ | ++ | ++ | ++ | + | +++ | +++ | +++ | +++ |
| | 2261 | ++++ | +++ | ++ | ++ | + | ++ | ++++ | +++ | ++++ | ++ |
| | 2274 | ++++ | + | +++ | + | ++ | + | ++++ | + | ++++ | + |
| | 2269 | ++++ | + | +++ | ++ | ++ | + | ++++ | + | ++++ | + |
| | 2258 | +++ | ++++ | ++ | ++ | + | ++ | +++ | +++ | +++ | +++ |
| | 2270 | ++++ | ++++ | ++ | ++ | + | ++ | +++ | +++ | +++ | ++ |
| | 2262 | ++++ | +++ | ++ | +++ | + | + | ++++ | ++ | ++++ | ++ |
| | 2267 | ++++ | + | +++ | ++ | + | + | ++++ | + | ++++ | + |
| | 2265 | ++++ | ++ | ++ | + | ++ | ++ | ++++ | + | +++ | + |
| | 2260 | ++++ | + | +++ | ++ | + | ++ | ++++ | + | ++++ | + |
| | 2272 | ++++ | ++ | +++ | + | ++ | + | +++ | + | ++++ | + |
| | 4411 | ++++ | ++ | ++ | ++ | + | + | ++++ | + | ++++ | + |
| | 4418 | ++++ | ++++ | ++ | ++ | + | + | ++++ | +++ | ++++ | ++ |
| | 4416 | ++++ | +++ | +++ | ++ | ++ | ++ | ++++ | ++ | ++++ | + |

¹+ = 0.3%-6.3%; ++ = 6.3%-12.0%; +++ = 12%-20.3%; +++ = 20.3%-55.9%; X indicates successful PE3B editing was observed with the PEgRNA (data not shown)

### Summary of PEgRNA Used:

| | | | | PBS | |
|---|---|---|---|---|---|
| PEgRNA² | Spacer | RTT³ | RTT | SEQ | PBS |
| SEQ ID NO: | SEQ ID NO: | SEQ ID NO: | Length | ID NO: | Length |
| 2557 | 33; 2293 | 2335 | 16 | 2295 | 8 |
| 2568 | 33; 2293 | 2339* | 16 | 2295 | 8 |
| 2871 | 33; 2293 | 2353 | 22 | 2295 | 8 |
| 2533 | 33; 2293 | 2320 | 13 | 2297 | 10 |
| 2615 | 33; 2293 | 2334* | 15 | 2297 | 10 |

²Indicated sequence does not contain the transcription adaptations used experimentally (i.e., addition of a 5′G if the spacer did not already start with a G and addition of 1-6 3′U from the U6 transcription termination sequence). The first 20 nt of the ngRNA sequence are the spacer; italics indicate that the spacer is a PE3B spacer.
³* = RTT contains a PAM silencing mutation.

TABLE XEb
PE3 screen at the H1069 mutation site in HEK293T cells

| | | PEgRNA² SEQ ID NO: | | | | | | | | | |
|---|---|---|---|---|---|---|---|---|---|---|---|
| | | 2633 | | 2585 | | 2667 | | 2744 | | 2890 | |
| | | % | % | % | % | % | % | % | % | % | % |
| | | Edit¹ | indel¹ | Edit¹ | indel¹ | Edit¹ | indel¹ | Edit¹ | indel¹ | Edit¹ | indel¹ |
| ngRNA² | PE2 | ++++ | + | ++++ | ++ | ++ | +++ | +++ | + | +++ | + |
| SEQ | 2263 | ++ | ++ | ++ | ++ | ++ | ++ | ++ | ++ | ++ | ++ |
| ID | 2266 | +++ | + | +++ | + | +++ | + | +++ | + | +++ | + |
| NO: | 2276 | ++ | +++ | ++ | +++ | ++ | +++ | ++ | ++ | ++ | +++ |
| | 2277 | ++++ | +++ | +++ | ++ | +++ | + | +++ | ++ | ++++ | ++ |
| | 2259 | ++++ | ++ | ++++ | ++ | ++++ | ++ | ++++ | ++ | ++++ | ++ |
| | 2257 | ++++ | +++ | ++++ | ++ | ++++ | ++ | ++++ | ++ | X | X |
| | 2268 | +++ | ++ | +++ | ++ | +++ | ++ | +++ | ++ | X | X |
| | 2264 | ++++ | + | ++++ | + | ++++ | + | +++ | + | X | X |
| | 2275 | ++++ | ++ | ++++ | ++ | ++++ | ++ | ++++ | ++ | ++++ | ++ |
| | 2273 | ++++ | +++ | ++++ | +++ | ++++ | +++ | ++++ | +++ | ++++ | ++ |
| | 2271 | +++ | +++ | +++ | +++ | +++ | +++ | +++ | +++ | ++++ | +++ |
| | 2261 | ++++ | +++ | ++++ | ++ | ++++ | +++ | ++++ | ++ | ++++ | ++ |
| | 2274 | ++++ | + | ++++ | + | ++++ | + | ++++ | + | ++++ | + |
| | 2269 | ++++ | + | ++++ | + | ++++ | + | ++++ | + | ++++ | + |
| | 2258 | +++ | ++++ | +++ | +++ | +++ | +++ | +++ | +++ | +++ | +++ |
| | 2270 | +++ | +++ | +++ | +++ | ++++ | +++ | +++ | +++ | ++++ | +++ |
| | 2262 | ++++ | +++ | ++++ | +++ | ++++ | +++ | ++++ | +++ | ++++ | ++ |
| | 2267 | ++++ | + | ++++ | + | ++++ | + | ++++ | + | ++++ | + |
| | 2265 | ++++ | + | ++++ | + | ++++ | + | +++ | + | ++++ | + |
| | 2260 | ++++ | + | ++++ | + | ++++ | + | ++++ | + | ++++ | + |
| | 2272 | ++++ | + | ++++ | + | ++++ | + | +++ | + | ++++ | + |
| | 4411 | ++++ | + | ++++ | + | ++++ | + | ++++ | + | ++++ | + |
| | 4418 | ++++ | +++ | ++++ | +++ | ++++ | +++ | ++++ | +++ | ++++ | ++ |
| | 4416 | ++++ | ++ | ++++ | + | ++++ | ++ | ++++ | ++ | + | + |

¹+ = 0.3%-6.3%; ++ = 6.3%-12.0%; +++ = 12%-20.3%; +++ = 20.3%-55.9%; X indicates successful PE3B editing was observed with the PEgRNA (data not shown)

### Summary of PEgRNA Used:

| | | | | PBS | |
|---|---|---|---|---|---|
| PEgRNA² | Spacer | RTT³ | RTT | SEQ | PBS |
| SEQ ID NO: | SEQ ID NO: | SEQ ID NO: | Length | ID NO: | Length |
| 2633 | 33; 2293 | 2335 | 16 | 2297 | 10 |
| 2585 | 33; 2293 | 2320 | 13 | 2299 | 12 |
| 2667 | 33; 2293 | 2329 | 15 | 2299 | 12 |
| 2744 | 33; 2293 | 2335 | 16 | 2299 | 12 |
| 2890 | 33; 2293 | 2344* | 18 | 2299 | 12 |

²Indicated sequence does not contain the transcription adaptations used experimentally (i.e., addition of a 5′G if the spacer did not already start with a G and addition of 1-6 3′U from the U6 transcription termination sequence). The first 20 nt of the ngRNA sequence are the spacer; italics indicate that the spacer is a PE3B spacer.
³* = RTT contains a PAM silencing mutation

TABLE XEc
PE3 screen at the H1069 mutation site in HEK293T cells

| | | PEgRNA² SEQ ID NO: | | | | | | | |
|---|---|---|---|---|---|---|---|---|---|
| | | 2675 | | 2729 | | 2898 | | 3165 | |
| | | % | % | % | % | % | % | % | % |
| | | Edit¹ | indel¹ | Edit¹ | indel¹ | Edit¹ | indel¹ | Edit¹ | indel¹ |
| ngRNA² | PE2 | ++++ | + | ++++ | ++ | +++ | ++ | ++++ | ++ |
| SEQ | 2263 | +++ | + | ++ | ++ | ++ | ++ | + | + |
| ID | 2266 | +++ | + | +++ | ++ | ++++ | + | ++ | + |
| NO: | 2276 | +++ | + | ++ | +++ | +++ | +++ | +++ | ++ |
| | 2277 | ++++ | + | +++ | +++ | ++++ | +++ | +++ | ++ |
| | 2259 | +++ | + | ++++ | ++ | ++++ | ++ | +++ | ++ |
| | 2257 | +++ | + | ++++ | ++ | ++++ | ++ | X | X |
| | 2268 | +++ | + | +++ | ++ | +++ | ++ | X | X |
| | 2264 | +++ | + | ++++ | + | ++++ | + | X | X |
| | 2275 | ++++ | + | ++++ | ++ | ++++ | ++ | ++++ | ++ |
| | 2273 | +++ | + | ++++ | +++ | ++++ | +++ | +++ | +++ |
| | 2271 | ++++ | + | +++ | +++ | ++++ | ++++ | +++ | +++ |
| | 2261 | +++ | + | ++++ | ++ | ++++ | +++ | +++ | +++ |
| | 2274 | ++++ | + | ++++ | + | ++++ | + | ++++ | + |
| | 2269 | ++++ | ++ | ++++ | + | ++++ | + | ++++ | ++ |
| | 2258 | ++++ | + | ++ | +++ | +++ | ++++ | ++ | +++ |
| | 2270 | ++++ | + | +++ | +++ | ++++ | +++ | +++ | ++ |
| | 2262 | ++++ | + | ++++ | ++ | ++++ | +++ | ++ | +++ |
| | 2267 | +++ | + | ++++ | + | ++++ | + | +++ | ++ |
| | 2265 | ++++ | + | ++++ | + | ++++ | + | ++ | + |
| | 2260 | ++++ | + | ++++ | + | ++++ | + | ++++ | + |
| | 2272 | + | + | ++++ | + | ++++ | + | +++ | + |
| | 4411 | +++ | + | ++++ | + | ++++ | + | +++ | ++ |
| | 4418 | +++ | + | ++++ | +++ | ++++ | +++ | ++ | +++ |
| | 4416 | ++++ | + | ++++ | + | ++++ | ++ | +++ | ++ |

¹+ = 0.3%-6.3%; ++ = 6.3%-12.0%; +++ = 12%-20.3%; +++ = 20.3%-55.9%; X indicates successful PE3B editing was observed with the PEgRNA (data not shown)

### Summary of PEgRNA Used:

| | | | | PBS | |
|---|---|---|---|---|---|
| PEgRNA² | Spacer | RTT³ | RTT | SEQ | PBS |
| SEQ ID NO: | SEQ ID NO: | SEQ ID NO: | Length | ID NO: | Length |
| 2675 | 33; 2293 | 2320 | 13 | 2301 | 14 |
| 2729 | 33; 2293 | 2326 | 14 | 2301 | 14 |
| 2898 | 33; 2293 | 2335 | 16 | 2301 | 14 |
| 3165 | 33; 2293 | 2344* | 18 | 2303 | 16 |

²Indicated sequence does not contain the transcription adaptations used experimentally (i.e., addition of a 5′G if the spacer did not already start with a G and addition of 1-6 3′U from the U6 transcription termination sequence). The first 20 nt of the ngRNA sequence are the spacer; italics indicate that the spacer is a PE3B spacer.
³* = RTT contains a PAM silencing mutation

TABLE XEd
PE3 screen at the H1069 mutation site in HEK293T cells

| | | PEgRNA² SEQ ID NO: | | | | | | | | | |
|---|---|---|---|---|---|---|---|---|---|---|---|
| | | 4540 | | 4756 | | 4624 | | 4592 | | 4691 | |
| | | % | % | % | % | % | % | % | % | % | % |
| | | Edit¹ | indel¹ | Edit¹ | indel¹ | Edit¹ | indel¹ | Edit¹ | indel¹ | Edit¹ | indel¹ |
| ngRNA² | PE2 | ++++ | +++ | +++ | ++ | ++++ | + | +++ | + | ++++ | + |
| SEQ | 2263 | ++ | + | + | + | ++ | + | ++ | + | ++ | + |
| ID | 2266 | +++ | + | ++ | + | +++ | + | +++ | + | +++ | + |
| NO: | 2276 | ++ | +++ | ++ | +++ | ++ | +++ | ++ | +++ | ++ | +++ |
| | 2277 | +++ | +++ | +++ | ++ | +++ | ++ | +++ | ++ | ++++ | +++ |
| | 2259 | ++++ | +++ | ++++ | ++ | ++++ | ++ | ++++ | ++ | ++++ | ++ |
| | 2257 | ++++ | +++ | ++++ | ++ | ++++ | ++ | ++++ | ++ | ++++ | +++ |
| | 2268 | +++ | ++ | +++ | + | +++ | + | ++++ | + | ++++ | ++ |
| | 2264 | ++++ | + | +++ | + | +++ | + | +++ | + | ++++ | + |
| | 2275 | ++++ | ++ | ++++ | + | ++++ | + | ++++ | + | ++++ | ++ |
| | 2273 | ++++ | +++ | ++++ | ++ | ++++ | ++ | ++++ | +++ | ++++ | +++ |
| | 2271 | +++ | +++ | +++ | +++ | +++ | +++ | +++ | +++ | +++ | +++ |
| | 2261 | ++++ | +++ | ++++ | ++ | ++++ | ++ | ++++ | ++ | ++++ | +++ |
| | 2274 | ++++ | + | ++++ | + | ++++ | + | ++++ | + | ++++ | + |
| | 2269 | ++++ | ++ | ++++ | + | ++++ | + | ++++ | + | ++++ | ++ |
| | 2258 | +++ | +++ | +++ | +++ | +++ | +++ | +++ | +++ | +++ | +++ |
| | 2270 | ++++ | +++ | +++ | ++ | +++ | +++ | ++++ | +++ | +++ | +++ |
| | 2262 | +++ | +++ | +++ | +++ | ++++ | ++ | ++++ | +++ | ++++ | +++ |
| | 2267 | ++++ | ++ | ++++ | + | ++++ | + | ++++ | + | ++++ | ++ |
| | 2265 | ++++ | + | +++ | + | +++ | + | +++ | + | ++++ | + |
| | 2260 | ++++ | ++ | ++++ | + | ++++ | + | ++++ | + | ++++ | ++ |
| | 2272 | ++++ | ++ | +++ | + | ++++ | + | ++++ | + | +++ | + |
| | 4411 | ++++ | ++ | ++++ | ++ | ++++ | + | ++++ | ++ | ++++ | ++ |
| | 4418 | ++++ | +++ | ++++ | ++ | ++++ | +++ | ++++ | +++ | ++++ | +++ |
| | 4416 | ++++ | +++ | ++++ | ++ | ++++ | ++ | ++++ | ++ | ++ | + |

¹+ = 0.3%-6.3%; ++ = 6.3%-12.0%; +++ = 12%-20.3%; +++ = 20.3%-55.9%

### Summary of PEgRNA Used:

| | | | | PBS | |
|---|---|---|---|---|---|
| PEgRNA² | Spacer | RTT | RTT | SEQ | PBS |
| SEQ ID NO: | SEQ ID NO: | SEQ ID NO: | Length | ID NO: | Length |
| 4540 | 58; 4425 | 4448 | 15 | 4427 | 8 |
| 4756 | 58; 4425 | 4456 | 21 | 4429 | 10 |
| 4624 | 58; 4425 | 4448 | 15 | 4431 | 12 |
| 4592 | 58; 4425 | 4441 | 12 | 4433 | 14 |
| 4691 | 58; 4425 | 4448 | 15 | 4433 | 14 |

²Indicated sequence does not contain the transcription adaptations used experimentally (i.e., addition of a 5′G if the spacer did not already start with a G and addition of 1-6 3′U from the U6 transcription termination sequence). The first 20 nt of the ngRNA sequence are the spacer; italics indicate that the spacer is a PE3B spacer.
³* = RTT contains a PAM silencing mutation

### Example 5—Prime Editing at a Lentivirus-Introduced ATP7B H1069Q Mutation Site in Primary Human Hepatocytes Using a PE3 System

[0453] PEgRNAs from the PE3 screen above were tested in hepatocytes. Primary human hepatocytes were transduced with lentivirus encoding the H1069Q cassette 2 days after cryorecovery, followed 6 days later by transfection with RNA encoding a prime editor, PEgRNA, and (where applicable) ngRNA. Genomic DNA was harvested after a 1-week incubation. Correction of the H1069Q mutation was examined and the results are provided in Table XD. “PET” in the ngRNA SEQ ID NO: column indicates a PE2 editing strategy was used instead of a PE3 editing strategy. These results demonstrate successful Prime Editing of the H1069 mutation site in clinically relevant cells types using both PE2 and PE3 editing strategies.

TABLE XF
PE3 screen at H1069Q mutation site in primary human hepatocytes

| PEgRNA¹ | | RTT | | PBS | | ngRNA¹ | | |
|---|---|---|---|---|---|---|---|---|
| SEQ ID | Spacer | SEQ ID | RTT | SEQ ID | PBS | SEQ ID | % | % |
| NO: | SEQ ID NO: | NO: | Len. | NO: | Len. | NO: | Edit | Indel |
| 2557 | 33; 2293 | 2335 | 16 | 2295 | 8 | PE2 | ++ | ++ |
| 2557 | 33; 2293 | 2335 | 16 | 2295 | 8 | 4414 | ++ | + |
| 2557 | 33; 2293 | 2335 | 16 | 2295 | 8 | 4412 | +++ | ++ |
| 2557 | 33; 2293 | 2335 | 16 | 2295 | 8 | 2269 | +++ | +++ |
| 2557 | 33; 2293 | 2335 | 16 | 2295 | 8 | 2260 | +++ | ++ |
| 2557 | 33; 2293 | 2335 | 16 | 2295 | 8 | PE2 | +++ | ++ |
| 2557 | 33; 2293 | 2335 | 16 | 2295 | 8 | 2268 | ++++ | ++ |
| 2557 | 33; 2293 | 2335 | 16 | 2295 | 8 | 2264 | ++++ | ++ |
| 2557 | 33; 2293 | 2335 | 16 | 2295 | 8 | 2269 | +++ | +++ |
| 2557 | 33; 2293 | 2335 | 16 | 2295 | 8 | 2260 | +++ | ++ |
| 4624 | 58; 4425 | 4448 | 15 | 4431 | 12 | PE2 | ++++ | + |
| 4624 | 58; 4425 | 4448 | 15 | 4431 | 12 | 2268 | + | + |
| 4624 | 58; 4425 | 4448 | 15 | 4431 | 12 | 2264 | ++++ | + |
| 4624 | 58; 4425 | 4448 | 15 | 4431 | 12 | 2269 | ++++ | +++ |
| 4624 | 58; 4425 | 4448 | 15 | 4431 | 12 | 2260 | ++++ | + |
| 2898 | 33; 2293 | 2335 | 16 | 2301 | 14 | PE2 | ++++ | + |
| 2898 | 33; 2293 | 2335 | 16 | 2301 | 14 | 2268 | ++++ | ++ |
| 2898 | 33; 2293 | 2335 | 16 | 2301 | 14 | 2264 | ++++ | + |
| 2898 | 33; 2293 | 2335 | 16 | 2301 | 14 | 2269 | ++++ | ++ |
| 2898 | 33; 2293 | 2335 | 16 | 2301 | 14 | 2260 | +++ | + |

¹Indicated PEgRNA or ngRNA sequence does not contain the adaptations for transcription from a DNA template used experimentally (i.e., addition of a 5′G if the spacer did not already start with a G and addition of 1-6 3′U from the U6 transcription termination sequence). The first 20 nts of the ngRNA sequence are the spacer; italics indicates the spacer is a PE3B spacer.
²+ = 0.03%-0.15%; ++ = 0.15%-0.55%; +++ = 0.55%-2.67%; ++++ = 2.67%-9.54%

### Example 6—Prime Editing at the Endogenous ATP7B H1069 Mutation Site in Mammalian Cells Using Synthetic PEgRNA in a PE2 System

[0454] An ATP7B H1069Q mutation was installed at the endogenous ATP7B locus in HEK293T and HepG2 cells by prime editing and single-cell clones were obtained via limiting dilution and clonal expansion, as described in Example 1. A PE2 screen measuring percent correction was performed at the endogenous ATP7B H1069Q locus. The cells were transfected with mRNA encoding a prime editor, and synthetic PEgRNA, as described in Example 1.

[0455] The results of the PE2 screen for the HEK and HepG2 are provided in Table XG. These data demonstrate successful Prime Editing at the endogenous ATP7B H1069Q mutation site in multiple mammalian cell models. Successful editing was observed with PEgRNAs containing multiple PBS lengths, multiple RTT lengths, and both with and without PAM silencing mutations.

[0456] These experiments were also performed in Huh cells (data not shown).

TABLE XG
PE2 screen at H1069Q mutation site in mammalian
cell culture using synthetic PEgRNAs

| PERNA¹ | | RTT² | | | | % Edit³ | % Edit⁴ |
|---|---|---|---|---|---|---|---|
| SEQ ID | Spacer | SEQ ID | RTT | PBS SEQ | PBS | in HEK | in HepG2 |
| NO: | SEQ ID NO: | NO: | Length | ID NO: | Length | cells | cells |
| 4495 | 58; 4425 | 4438 | 10 | 4427 | 8 | +++ | +++ |
| 4500 | 58; 4425 | 4440 | 11 | 4427 | 8 | ++++ | ++++ |
| 4504 | 58; 4425 | 4441 | 12 | 4427 | 8 | ++++ | ++ |
| 4517 | 58; 4425 | 4444 | 13 | 4427 | 8 | ++++ | +++ |
| 4522 | 58; 4425 | 4446 | 14 | 4427 | 8 | ++++ | + |
| 4540 | 58; 4425 | 4448 | 15 | 4427 | 8 | ++++ | ++++ |
| 4580 | 58; 4425 | 4450 | 17 | 4427 | 8 | ++++ | ++++ |
| 4591 | 58; 4425 | 4452 | 18 | 4427 | 8 | ++++ | +++ |
| 4667 | 58; 4425 | 4456 | 21 | 4427 | 8 | ++++ | +++ |
| 4499 | 58; 4425 | 4438 | 10 | 4428 | 9 | ++++ | ++++ |
| 4508 | 58; 4425 | 4440 | 11 | 4428 | 9 | +++ | |
| 4509 | 58; 4425 | 4441 | 12 | 4428 | 9 | ++++ | +++ |
| 4524 | 58; 4425 | 4444 | 13 | 4428 | 9 | ++++ | ++++ |
| 4531 | 58; 4425 | 4446 | 14 | 4428 | 9 | ++++ | ++++ |
| 4545 | 58; 4425 | 4448 | 15 | 4428 | 9 | ++++ | ++ |
| 4603 | 58; 4425 | 4450 | 17 | 4428 | 9 | ++++ | ++ |
| 4627 | 58; 4425 | 4452 | 18 | 4428 | 9 | ++++ | ++++ |
| 4710 | 58; 4425 | 4456 | 21 | 4428 | 9 | ++++ | +++ |
| 4507 | 58; 4425 | 4438 | 10 | 4429 | 10 | +++ | +++ |
| 4514 | 58; 4425 | 4440 | 11 | 4429 | 10 | ++++ | +++ |
| 4527 | 58; 4425 | 4441 | 12 | 4429 | 10 | +++ | ++++ |
| 4533 | 58; 4425 | 4444 | 13 | 4429 | 10 | ++++ | ++++ |
| 4555 | 58; 4425 | 4446 | 14 | 4429 | 10 | ++++ | +++ |
| 4564 | 58; 4425 | 4448 | 15 | 4429 | 10 | ++++ | ++++ |
| 4612 | 58; 4425 | 4450 | 17 | 4429 | 10 | ++++ | +++ |
| 4649 | 58; 4425 | 4452 | 18 | 4429 | 10 | ++++ | +++ |
| 4756 | 58; 4425 | 4456 | 21 | 4429 | 10 | ++++ | ++++ |
| 4510 | 58; 4425 | 4438 | 10 | 4430 | 11 | +++ | ++++ |
| 4529 | 58; 4425 | 4440 | 11 | 4430 | 11 | ++++ | ++++ |
| 4544 | 58; 4425 | 4441 | 12 | 4430 | 11 | ++++ | +++ |
| 4556 | 58; 4425 | 4444 | 13 | 4430 | 11 | ++++ | ++++ |
| 4579 | 58; 4425 | 4446 | 14 | 4430 | 11 | ++++ | ++++ |
| 4589 | 58; 4425 | 4448 | 15 | 4430 | 11 | ++++ | ++++ |
| 4634 | 58; 4425 | 4450 | 17 | 4430 | 11 | ++++ | ++++ |
| 4675 | 58; 4425 | 4452 | 18 | 4430 | 11 | ++++ | +++ |
| 4759 | 58; 4425 | 4456 | 21 | 4430 | 11 | ++++ | ++++ |
| 4519 | 58; 4425 | 4438 | 10 | 4431 | 12 | ++ | ++++ |
| 4542 | 58; 4425 | 4440 | 11 | 4431 | 12 | ++++ | +++ |
| 4559 | 58; 4425 | 4441 | 12 | 4431 | 12 | ++++ | +++ |
| 4576 | 58; 4425 | 4444 | 13 | 4431 | 12 | ++++ | +++ |
| 4588 | 58; 4425 | 4446 | 14 | 4431 | 12 | ++++ | ++++ |
| 4624 | 58; 4425 | 4448 | 15 | 4431 | 12 | ++++ | ++++ |
| 4679 | 58; 4425 | 4450 | 17 | 4431 | 12 | ++++ | ++++ |
| 4697 | 58; 4425 | 4452 | 18 | 4431 | 12 | +++ | ++++ |
| 4817 | 58; 4425 | 4456 | 21 | 4431 | 12 | +++ | +++ |
| 4532 | 58; 4425 | 4438 | 10 | 4432 | 13 | ++++ | ++++ |
| 4558 | 58; 4425 | 4440 | 11 | 4432 | 13 | +++ | ++++ |
| 4577 | 58; 4425 | 4441 | 12 | 4432 | 13 | ++++ | ++++ |
| 4605 | 58; 4425 | 4444 | 13 | 4432 | 13 | ++++ | ++++ |
| 4623 | 58; 4425 | 4446 | 14 | 4432 | 13 | ++++ | ++ |
| 4657 | 58; 4425 | 4448 | 15 | 4432 | 13 | ++++ | ++++ |
| 4719 | 58; 4425 | 4450 | 17 | 4432 | 13 | ++++ | |
| 4740 | 58; 4425 | 4452 | 18 | 4432 | 13 | ++++ | ++++ |
| 4827 | 58; 4425 | 4456 | 21 | 4432 | 13 | ++++ | ++++ |
| 4553 | 58; 4425 | 4438 | 10 | 4433 | 14 | +++ | ++ |
| 4562 | 58; 4425 | 4440 | 11 | 4433 | 14 | ++++ | ++++ |
| 4592 | 58; 4425 | 4441 | 12 | 4433 | 14 | ++++ | ++++ |
| 4618 | 58; 4425 | 4444 | 13 | 4433 | 14 | ++++ | +++ |
| 4640 | 58; 4425 | 4446 | 14 | 4433 | 14 | ++++ | +++ |
| 4691 | 58; 4425 | 4448 | 15 | 4433 | 14 | ++++ | +++ |
| 4726 | 58; 4425 | 4450 | 17 | 4433 | 14 | ++ | ++++ |
| 4761 | 58; 4425 | 4452 | 18 | 4433 | 14 | +++ | +++ |
| 4852 | 58; 4425 | 4456 | 21 | 4433 | 14 | ++ | ++++ |
| 4575 | 58; 4425 | 4438 | 10 | 4434 | 15 | ++ | ++++ |
| 4595 | 58; 4425 | 4440 | 11 | 4434 | 15 | +++ | +++ |
| 4619 | 58; 4425 | 4441 | 12 | 4434 | 15 | +++ | ++++ |
| 4638 | 58; 4425 | 4444 | 13 | 4434 | 15 | ++ | +++ |
| 4684 | 58; 4425 | 4446 | 14 | 4434 | 15 | ++ | +++ |
| 4720 | 58; 4425 | 4448 | 15 | 4434 | 15 | ++ | ++++ |
| 4758 | 58; 4425 | 4450 | 17 | 4434 | 15 | ++ | +++ |
| 4812 | 58; 4425 | 4452 | 18 | 4434 | 15 | ++ | ++++ |
| 4875 | 58; 4425 | 4456 | 21 | 4434 | 15 | + | +++ |
| 4586 | 58; 4425 | 4438 | 10 | 4435 | 16 | +++ | ++++ |
| 4629 | 58; 4425 | 4440 | 11 | 4435 | 16 | ++++ | ++++ |
| 4653 | 58; 4425 | 4441 | 12 | 4435 | 16 | ++++ | +++ |
| 4668 | 58; 4425 | 4444 | 13 | 4435 | 16 | ++++ | ++++ |
| 4724 | 58; 4425 | 4446 | 14 | 4435 | 16 | ++++ | ++++ |
| 4738 | 58; 4425 | 4448 | 15 | 4435 | 16 | ++++ | +++ |
| 4809 | 58; 4425 | 4450 | 17 | 4435 | 16 | ++++ | ++ |
| 4840 | 58; 4425 | 4452 | 18 | 4435 | 16 | + | ++++ |
| 4893 | 58; 4425 | 4456 | 21 | 4435 | 16 | ++++ | ++++ |
| 4614 | 58; 4425 | 4438 | 10 | 4436 | 17 | ++++ | +++ |
| 4655 | 58; 4425 | 4440 | 11 | 4436 | 17 | +++ | ++++ |
| 4674 | 58; 4425 | 4441 | 12 | 4436 | 17 | ++++ | +++ |
| 4722 | 58; 4425 | 4444 | 13 | 4436 | 17 | ++ | ++ |
| 4748 | 58; 4425 | 4446 | 14 | 4436 | 17 | ++ | +++ |
| 4785 | 58; 4425 | 4448 | 15 | 4436 | 17 | +++ | +++ |
| 4835 | 58; 4425 | 4450 | 17 | 4436 | 17 | +++ | +++ |
| 4856 | 58; 4425 | 4452 | 18 | 4436 | 17 | +++ | ++++ |
| 4912 | 58; 4425 | 4456 | 21 | 4436 | 17 | +++ | +++ |
| 2453 | 33; 2293 | 2307 | 11 | 2295 | 8 | ++ | ++ |
| 2480 | 33; 2293 | 2307 | 11 | 2297 | 10 | +++ | +++ |
| 2522 | 33; 2293 | 2307 | 11 | 2299 | 12 | +++ | +++ |
| 2606 | 33; 2293 | 2307 | 11 | 2301 | 14 | ++ | +++ |
| 2683 | 33; 2293 | 2307 | 11 | 2303 | 16 | +++ | +++ |
| 2459 | 33; 2293 | 2313 | 12 | 2295 | 8 | ++++ | ++++ |
| 2510 | 33; 2293 | 2313 | 12 | 2297 | 10 | ++++ | ++++ |
| 2575 | 33; 2293 | 2313 | 12 | 2299 | 12 | +++ | ++++ |
| 2623 | 33; 2293 | 2313 | 12 | 2301 | 14 | ++++ | ++++ |
| 2758 | 33; 2293 | 2313 | 12 | 2303 | 16 | ++++ | ++++ |
| 2489 | 33; 2293 | 2320 | 13 | 2295 | 8 | | ++++ |
| 2533 | 33; 2293 | 2320 | 13 | 2297 | 10 | | ++++ |
| 2585 | 33; 2293 | 2320 | 13 | 2299 | 12 | | ++++ |
| 2675 | 33; 2293 | 2320 | 13 | 2301 | 14 | +++ | +++ |
| 2825 | 33; 2293 | 2320 | 13 | 2303 | 16 | +++ | +++ |
| 2515 | 33; 2293 | 2326 | 14 | 2295 | 8 | +++ | +++ |
| 2559 | 33; 2293 | 2326 | 14 | 2297 | 10 | ++++ | ++++ |
| 2628 | 33; 2293 | 2326 | 14 | 2299 | 12 | +++ | ++++ |
| 2729 | 33; 2293 | 2326 | 14 | 2301 | 14 | ++++ | ++++ |
| 2844 | 33; 2293 | 2326 | 14 | 2303 | 16 | +++ | +++ |
| 2548 | 33; 2293 | 2329 | 15 | 2295 | 8 | ++++ | ++++ |
| 2605 | 33; 2293 | 2329 | 15 | 2297 | 10 | ++++ | ++++ |
| 2667 | 33; 2293 | 2329 | 15 | 2299 | 12 | ++++ | +++ |
| 2802 | 33; 2293 | 2329 | 15 | 2301 | 14 | ++++ | ++++ |
| 2932 | 33; 2293 | 2329 | 15 | 2303 | 16 | +++ | ++++ |
| 2557 | 33; 2293 | 2335 | 16 | 2295 | 8 | ++++ | +++ |
| 2633 | 33; 2293 | 2335 | 16 | 2297 | 10 | ++++ | ++++ |
| 2744 | 33; 2293 | 2335 | 16 | 2299 | 12 | ++++ | ++++ |
| 2898 | 33; 2293 | 2335 | 16 | 2301 | 14 | ++++ | +++ |
| 2993 | 33; 2293 | 2335 | 16 | 2303 | 16 | ++++ | ++++ |
| 2637 | 33; 2293 | 2342 | 18 | 2295 | 8 | ++++ | +++ |
| 2769 | 33; 2293 | 2342 | 18 | 2297 | 10 | ++++ | ++++ |
| 2886 | 33; 2293 | 2342 | 18 | 2299 | 12 | ++++ | +++ |
| 3043 | 33; 2293 | 2342 | 18 | 2301 | 14 | ++++ | ++++ |
| 3144 | 33; 2293 | 2342 | 18 | 2303 | 16 | ++++ | ++++ |
| 2689 | 33; 2293 | 2351 | 19 | 2295 | 8 | ++++ | +++ |
| 2801 | 33; 2293 | 2351 | 19 | 2297 | 10 | +++ | +++ |
| 2916 | 33; 2293 | 2351 | 19 | 2299 | 12 | +++ | +++ |
| 3076 | 33; 2293 | 2351 | 19 | 2301 | 14 | +++ | +++ |
| 3263 | 33; 2293 | 2351 | 19 | 2303 | 16 | +++ | +++ |
| 2871 | 33; 2293 | 2353 | 22 | 2295 | 8 | +++ | ++ |
| 2983 | 33; 2293 | 2353 | 22 | 2297 | 10 | +++ | +++ |
| 3163 | 33; 2293 | 2353 | 22 | 2299 | 12 | +++ | +++ |
| 3287 | 33; 2293 | 2353 | 22 | 2301 | 14 | +++ | +++ |
| 3441 | 33; 2293 | 2353 | 22 | 2303 | 16 | +++ | ++ |
| 2458 | 33; 2293 | 2310* | 11 | 2295 | 8 | + | ++ |
| 2487 | 33; 2293 | 2310* | 11 | 2297 | 10 | + | ++ |
| 2526 | 33; 2293 | 2310* | 11 | 2299 | 12 | + | ++ |
| 2609 | 33; 2293 | 2310* | 11 | 2301 | 14 | + | ++ |
| 2680 | 33; 2293 | 2310* | 11 | 2303 | 16 | + | + |
| 2466 | 33; 2293 | 2311* | 12 | 2295 | 8 | + | + |
| 2513 | 33; 2293 | 2311* | 12 | 2297 | 10 | + | ++ |
| 2554 | 33; 2293 | 2311* | 12 | 2299 | 12 | + | ++ |
| 2660 | 33; 2293 | 2311* | 12 | 2301 | 14 | + | ++ |
| 2759 | 33; 2293 | 2311* | 12 | 2303 | 16 | + | ++ |
| 2490 | 33; 2293 | 2321* | 13 | 2295 | 8 | + | ++ |
| 2531 | 33; 2293 | 2321* | 13 | 2297 | 10 | + | + |
| 2610 | 33; 2293 | 2321* | 13 | 2299 | 12 | ++ | ++ |
| 2685 | 33; 2293 | 2321* | 13 | 2301 | 14 | + | + |
| 2814 | 33; 2293 | 2321* | 13 | 2303 | 16 | + | ++ |
| 2512 | 33; 2293 | 2328* | 14 | 2295 | 8 | ++ | + |
| 2561 | 33; 2293 | 2328* | 14 | 2297 | 10 | + | ++ |
| 2643 | 33; 2293 | 2328* | 14 | 2299 | 12 | + | + |
| 2764 | 33; 2293 | 2328* | 14 | 2301 | 14 | + | + |
| 2843 | 33; 2293 | 2328* | 14 | 2303 | 16 | + | ++ |
| 2546 | 33; 2293 | 2334* | 15 | 2295 | 8 | ++ | ++ |
| 2615 | 33; 2293 | 2334* | 15 | 2297 | 10 | ++ | ++ |
| 2701 | 33; 2293 | 2334* | 15 | 2299 | 12 | ++ | +++ |
| 2777 | 33; 2293 | 2334* | 15 | 2301 | 14 | ++ | ++ |
| 2964 | 33; 2293 | 2334* | 15 | 2303 | 16 | ++ | ++ |
| 2568 | 33; 2293 | 2339* | 16 | 2295 | 8 | ++ | ++ |
| 2645 | 33; 2293 | 2339* | 16 | 2297 | 10 | ++ | ++ |
| 2735 | 33; 2293 | 2339* | 16 | 2299 | 12 | ++ | +++ |
| 2893 | 33; 2293 | 2339* | 16 | 2301 | 14 | +++ | +++ |
| 2988 | 33; 2293 | 2339* | 16 | 2303 | 16 | +++ | +++ |
| 2638 | 33; 2293 | 2343* | 18 | 2295 | 8 | +++ | ++ |
| 2772 | 33; 2293 | 2343* | 18 | 2297 | 10 | +++ | ++ |
| 2885 | 33; 2293 | 2343* | 18 | 2299 | 12 | +++ | +++ |
| 3015 | 33; 2293 | 2343* | 18 | 2301 | 14 | +++ | ++ |
| 3123 | 33; 2293 | 2343* | 18 | 2303 | 16 | +++ | ++ |
| 2690 | 33; 2293 | 2348* | 19 | 2295 | 8 | +++ | + |
| 2826 | 33; 2293 | 2348* | 19 | 2297 | 10 | +++ | +++ |
| 2960 | 33; 2293 | 2348* | 19 | 2299 | 12 | +++ | ++ |
| 3080 | 33; 2293 | 2348* | 19 | 2301 | 14 | +++ | ++ |
| 3248 | 33; 2293 | 2348* | 19 | 2303 | 16 | +++ | ++ |
| 2891 | 33; 2293 | 2355* | 22 | 2295 | 8 | ++ | ++ |
| 3012 | 33; 2293 | 2355* | 22 | 2297 | 10 | ++ | ++ |
| 3188 | 33; 2293 | 2355* | 22 | 2299 | 12 | ++ | +++ |
| 3301 | 33; 2293 | 2355* | 22 | 2301 | 14 | + | ++ |
| 3430 | 33; 2293 | 2355* | 22 | 2303 | 16 | ++ | ++ |
| 2457 | 33; 2293 | 2306* | 11 | 2295 | 8 | + | ++ |
| 2488 | 33; 2293 | 2306* | 11 | 2297 | 10 | + | ++ |
| 2544 | 33; 2293 | 2306* | 11 | 2299 | 12 | + | + |
| 2584 | 33; 2293 | 2306* | 11 | 2301 | 14 | + | ++ |
| 2702 | 33; 2293 | 2306* | 11 | 2303 | 16 | ++ | + |
| 2461 | 33; 2293 | 2316* | 12 | 2295 | 8 | + | ++ |
| 2493 | 33; 2293 | 2316* | 12 | 2297 | 10 | + | ++ |
| 2563 | 33; 2293 | 2316* | 12 | 2299 | 12 | ++ | |
| 2619 | 33; 2293 | 2316* | 12 | 2301 | 14 | + | |
| 2757 | 33; 2293 | 2316* | 12 | 2303 | 16 | + | |
| 2484 | 33; 2293 | 2319* | 13 | 2295 | 8 | ++ | |
| 2527 | 33; 2293 | 2319* | 13 | 2297 | 10 | ++ | |
| 2590 | 33; 2293 | 2319* | 13 | 2299 | 12 | +++ | |
| 2670 | 33; 2293 | 2319* | 13 | 2301 | 14 | ++ | |
| 2800 | 33; 2293 | 2319* | 13 | 2303 | 16 | +++ | |
| 2509 | 33; 2293 | 2325* | 14 | 2295 | 8 | ++ | |
| 2571 | 33; 2293 | 2325* | 14 | 2297 | 10 | ++ | |
| 2665 | 33; 2293 | 2325* | 14 | 2299 | 12 | +++ | |
| 2730 | 33; 2293 | 2325* | 14 | 2301 | 14 | ++ | |
| 2841 | 33; 2293 | 2325* | 14 | 2303 | 16 | ++ | ++ |
| 2541 | 33; 2293 | 2332* | 15 | 2295 | 8 | ++ | + |
| 2598 | 33; 2293 | 2332* | 15 | 2297 | 10 | ++++ | +++ |
| 2674 | 33; 2293 | 2332* | 15 | 2299 | 12 | +++ | ++ |
| 2832 | 33; 2293 | 2332* | 15 | 2301 | 14 | +++ | ++ |
| 2933 | 33; 2293 | 2332* | 15 | 2303 | 16 | +++ | ++ |
| 2551 | 33; 2293 | 2337* | 16 | 2295 | 8 | +++ | +++ |
| 2634 | 33; 2293 | 2337* | 16 | 2297 | 10 | +++ | ++ |
| 2733 | 33; 2293 | 2337* | 16 | 2299 | 12 | +++ | ++ |
| 2889 | 33; 2293 | 2337* | 16 | 2301 | 14 | +++ | +++ |
| 2979 | 33; 2293 | 2337* | 16 | 2303 | 16 | +++ | ++ |
| 2636 | 33; 2293 | 2344* | 18 | 2295 | 8 | +++ | + |
| 2765 | 33; 2293 | 2344* | 18 | 2297 | 10 | ++ | |
| 2890 | 33; 2293 | 2344* | 18 | 2299 | 12 | + | |
| 2982 | 33; 2293 | 2344* | 18 | 2301 | 14 | + | |
| 3165 | 33; 2293 | 2344* | 18 | 2303 | 16 | ++ | |
| 2706 | 33; 2293 | 2352* | 19 | 2295 | 8 | ++ | |
| 2807 | 33; 2293 | 2352* | 19 | 2297 | 10 | + | |
| 2962 | 33; 2293 | 2352* | 19 | 2299 | 12 | +++ | |
| 3072 | 33; 2293 | 2352* | 19 | 2301 | 14 | ++ | |
| 3210 | 33; 2293 | 2352* | 19 | 2303 | 16 | + | |
| 2894 | 33; 2293 | 2358* | 22 | 2295 | 8 | ++ | |
| 2977 | 33; 2293 | 2358* | 22 | 2297 | 10 | ++ | |
| 3166 | 33; 2293 | 2358* | 22 | 2299 | 12 | ++ | |
| 3300 | 33; 2293 | 2358* | 22 | 2301 | 14 | +++ | ++ |
| 3442 | 33; 2293 | 2358* | 22 | 2303 | 16 | +++ | + |
| 2451 | 33; 2293 | 2308* | 11 | 2295 | 8 | + | ++ |
| 2478 | 33; 2293 | 2308* | 11 | 2297 | 10 | + | ++ |
| 2528 | 33; 2293 | 2308* | 11 | 2299 | 12 | + | ++ |
| 2602 | 33; 2293 | 2308* | 11 | 2301 | 14 | + | ++ |
| 2711 | 33; 2293 | 2308* | 11 | 2303 | 16 | + | + |
| 2460 | 33; 2293 | 2312* | 12 | 2295 | 8 | ++ | + |
| 2514 | 33; 2293 | 2312* | 12 | 2297 | 10 | + | ++ |
| 2562 | 33; 2293 | 2312* | 12 | 2299 | 12 | + | ++ |
| 2647 | 33; 2293 | 2312* | 12 | 2301 | 14 | ++ | ++ |
| 2760 | 33; 2293 | 2312* | 12 | 2303 | 16 | + | ++ |
| 2473 | 33; 2293 | 2318* | 13 | 2295 | 8 | ++ | |
| 2520 | 33; 2293 | 2318* | 13 | 2297 | 10 | + | |
| 2596 | 33; 2293 | 2318* | 13 | 2299 | 12 | + | |
| 2677 | 33; 2293 | 2318* | 13 | 2301 | 14 | + | |
| 2830 | 33; 2293 | 2318* | 13 | 2303 | 16 | + | |
| 2501 | 33; 2293 | 2324* | 14 | 2295 | 8 | ++ | |
| 2553 | 33; 2293 | 2324* | 14 | 2297 | 10 | ++ | |
| 2646 | 33; 2293 | 2324* | 14 | 2299 | 12 | ++ | |
| 2749 | 33; 2293 | 2324* | 14 | 2301 | 14 | + | |
| 2842 | 33; 2293 | 2324* | 14 | 2303 | 16 | ++ | |
| 2535 | 33; 2293 | 2333* | 15 | 2295 | 8 | + | |
| 2618 | 33; 2293 | 2333* | 15 | 2297 | 10 | ++ | |
| 2699 | 33; 2293 | 2333* | 15 | 2299 | 12 | +++ | + |
| 2816 | 33; 2293 | 2333* | 15 | 2301 | 14 | +++ | ++ |
| 2926 | 33; 2293 | 2333* | 15 | 2303 | 16 | +++ | ++ |
| 2564 | 33; 2293 | 2338* | 16 | 2295 | 8 | +++ | ++ |
| 2632 | 33; 2293 | 2338* | 16 | 2297 | 10 | +++ | + |
| 2734 | 33; 2293 | 2338* | 16 | 2299 | 12 | +++ | +++ |
| 2834 | 33; 2293 | 2338* | 16 | 2301 | 14 | ++ | +++ |
| 2972 | 33; 2293 | 2338* | 16 | 2303 | 16 | ++ | + |
| 2635 | 33; 2293 | 2346* | 18 | 2295 | 8 | +++ | + |
| 2773 | 33; 2293 | 2346* | 18 | 2297 | 10 | +++ | ++ |
| 2899 | 33; 2293 | 2346* | 18 | 2299 | 12 | +++ | ++ |
| 3013 | 33; 2293 | 2346* | 18 | 2301 | 14 | +++ | + |
| 3148 | 33; 2293 | 2346* | 18 | 2303 | 16 | ++ | |
| 2669 | 33; 2293 | 2347* | 19 | 2295 | 8 | ++ | |
| 2829 | 33; 2293 | 2347* | 19 | 2297 | 10 | ++ | + |
| 2941 | 33; 2293 | 2347* | 19 | 2299 | 12 | ++ | + |
| 3071 | 33; 2293 | 2347* | 19 | 2301 | 14 | ++ | + |
| 3200 | 33; 2293 | 2347* | 19 | 2303 | 16 | ++ | + |
| 2856 | 33; 2293 | 2356* | 22 | 2295 | 8 | ++ | + |
| 3023 | 33; 2293 | 2356* | 22 | 2297 | 10 | ++ | + |
| 3122 | 33; 2293 | 2356* | 22 | 2299 | 12 | ++ | + |
| 3275 | 33; 2293 | 2356* | 22 | 2301 | 14 | ++ | + |
| 3420 | 33; 2293 | 2356* | 22 | 2303 | 16 | + | + |
| 1550 | 1505; 2055 | 1518 | 21 | 1507 | 8 | + | |
| 1565 | 1505; 2055 | 1518 | 21 | 1509 | 10 | + | + |
| 1578 | 1505; 2055 | 1518 | 21 | 1511 | 12 | + | + |
| 1602 | 1505; 2055 | 1518 | 21 | 1513 | 14 | + | + |
| 1640 | 1505; 2055 | 1518 | 21 | 1515 | 16 | + | + |
| 1554 | 1505; 2055 | 1519 | 22 | 1507 | 8 | + | + |
| 1569 | 1505; 2055 | 1519 | 22 | 1509 | 10 | + | + |
| 1591 | 1505; 2055 | 1519 | 22 | 1511 | 12 | + | + |
| 1626 | 1505; 2055 | 1519 | 22 | 1513 | 14 | + | + |
| 1654 | 1505; 2055 | 1519 | 22 | 1515 | 16 | + | + |
| 1562 | 1505; 2055 | 1522 | 23 | 1507 | 8 | + | + |
| 1580 | 1505; 2055 | 1522 | 23 | 1509 | 10 | + | + |
| 1609 | 1505; 2055 | 1522 | 23 | 1511 | 12 | + | + |
| 1628 | 1505; 2055 | 1522 | 23 | 1513 | 14 | | |
| 1691 | 1505; 2055 | 1522 | 23 | 1515 | 16 | | |
| 1570 | 1505; 2055 | 1524 | 24 | 1507 | 8 | | |
| 1593 | 1505; 2055 | 1524 | 24 | 1509 | 10 | | |
| 1616 | 1505; 2055 | 1524 | 24 | 1511 | 12 | | |
| 1664 | 1505; 2055 | 1524 | 24 | 1513 | 14 | | |
| 1708 | 1505; 2055 | 1524 | 24 | 1515 | 16 | | |
| 1583 | 1505; 2055 | 1526 | 25 | 1507 | 8 | | |
| 1600 | 1505; 2055 | 1526 | 25 | 1509 | 10 | | |
| 1643 | 1505; 2055 | 1526 | 25 | 1511 | 12 | | |
| 1671 | 1505; 2055 | 1526 | 25 | 1513 | 14 | | |
| 1725 | 1505; 2055 | 1526 | 25 | 1515 | 16 | | |
| 1551 | 1505; 2055 | 1517* | 21 | 1507 | 8 | + | + |
| 1564 | 1505; 2055 | 1517* | 21 | 1509 | 10 | + | + |
| 1586 | 1505; 2055 | 1517* | 21 | 1511 | 12 | + | + |
| 1606 | 1505; 2055 | 1517* | 21 | 1513 | 14 | + | + |
| 1646 | 1505; 2055 | 1517* | 21 | 1515 | 16 | + | + |
| 1553 | 1505; 2055 | 1520* | 22 | 1507 | 8 | + | + |
| 1575 | 1505; 2055 | 1520* | 22 | 1509 | 10 | + | + |
| 1587 | 1505; 2055 | 1520* | 22 | 1511 | 12 | + | + |
| 1615 | 1505; 2055 | 1520* | 22 | 1513 | 14 | + | + |
| 1663 | 1505; 2055 | 1520* | 22 | 1515 | 16 | + | + |
| 1566 | 1505; 2055 | 1521* | 23 | 1507 | 8 | + | + |
| 1577 | 1505; 2055 | 1521* | 23 | 1509 | 10 | ++ | + |
| 1607 | 1505; 2055 | 1521* | 23 | 1511 | 12 | + | |
| 1645 | 1505; 2055 | 1521* | 23 | 1513 | 14 | + | |
| 1678 | 1505; 2055 | 1521* | 23 | 1515 | 16 | ++ | |
| 1567 | 1505; 2055 | 1523* | 24 | 1507 | 8 | + | |
| 1590 | 1505; 2055 | 1523* | 24 | 1509 | 10 | ++ | |
| 1622 | 1505; 2055 | 1523* | 24 | 1511 | 12 | ++ | |
| 1668 | 1505; 2055 | 1523* | 24 | 1513 | 14 | +++ | |
| 1694 | 1505; 2055 | 1523* | 24 | 1515 | 16 | + | |
| 1584 | 1505; 2055 | 1525* | 25 | 1507 | 8 | +++ | |
| 1598 | 1505; 2055 | 1525* | 25 | 1509 | 10 | +++ | |
| 1637 | 1505; 2055 | 1525* | 25 | 1511 | 12 | ++ | |
| 1679 | 1505; 2055 | 1525* | 25 | 1513 | 14 | +++ | |
| 1721 | 1505; 2055 | 1525* | 25 | 1515 | 16 | +++ | + |
| 804 | 682; 2087 | 711 | 28 | 684 | 8 | +++ | + |
| 852 | 682; 2087 | 711 | 28 | 686 | 10 | ++ | + |
| 896 | 682; 2087 | 711 | 28 | 688 | 12 | ++ | + |
| 989 | 682; 2087 | 711 | 28 | 690 | 14 | ++ | + |
| 911 | 682; 2087 | 719 | 32 | 684 | 8 | ++ | + |
| 979 | 682; 2087 | 719 | 32 | 686 | 10 | ++ | + |
| 1046 | 682; 2087 | 719 | 32 | 688 | 12 | + | + |
| 1147 | 682; 2087 | 719 | 32 | 690 | 14 | + | + |
| 992 | 682; 2087 | 720 | 34 | 684 | 8 | ++ | + |
| 1045 | 682; 2087 | 720 | 34 | 686 | 10 | ++ | + |
| 1172 | 682; 2087 | 720 | 34 | 688 | 12 | ++ | + |
| 1244 | 682; 2087 | 720 | 34 | 690 | 14 | + | |
| 1124 | 682; 2087 | 724 | 37 | 684 | 8 | ++ | |
| 1220 | 682; 2087 | 724 | 37 | 686 | 10 | + | |
| 1270 | 682; 2087 | 724 | 37 | 688 | 12 | ++ | |
| 1342 | 682; 2087 | 724 | 37 | 690 | 14 | ++ | |

¹Indicated PEgRNA sequence does not contain the 3′ linker and hairpin motif used experimentally. The experimental PEgRNA further contained 3′ mN*mN*mN*N and 5′mN*mN*mN* modifications, where m indicates that the nucleotide contains a 2′-O-Me modification and a * indicates a phosphorothioate bond.
²* = RTT contains a PAM silencing mutation
³+ = 0.01%-0.77%, ++ = 0.77%-5.09%, +++ = 5.09%-15.96%, ++++ = 15.96%-45.89%
⁴+ = 0.01%-1.66%, ++ = 1.66%-2.62%, +++ = 2.62%-5.25%, ++++ = 5.25%-17.71%

### Example 7—Prime Editing with Silent Recoding at H1069Q Mutation Site

[0457] A PE2 screen measuring percent correction and percent indel formation was performed in HEK 293T at the endogenous ATP7B H1069Q locus. The cells were transfected with mRNA encoding a prime editor, and synthetic PEgRNA, as described in Example 1. Unlike previous examples, the PEgRNA used here were not designed to restore the wild-type nucleic acid sequence at the H1069Q site. Rather, the PEgRNA used here were designed to restore the wild-type amino acid sequence using an alternative histidine codon. The results presented in Table XH demonstrate successful recoding at the H1069Q mutation site using PEgRNA having multiple RTT and PBS length combinations.

TABLE XH
PE2 screen with silent recoding at H1069Q mutation site
in mammalian cell culture using synthetic PEgRNAs

| PEgRNA¹ | | | | | | | |
|---|---|---|---|---|---|---|---|
| SEQ ID | Spacer | RTT SEQ | RTT | PBS SEQ | PBS | | |
| NO: | SEQ ID NO: | ID NO: | Length | ID NO: | Length | % Edit² | % Indel² |
| 4494 | 58; 4425 | 4437 | 10 | 4427 | 8 | ++ | + |
| 4501 | 58; 4425 | 4439 | 11 | 4427 | 8 | +++ | + |
| 4503 | 58; 4425 | 4442 | 12 | 4427 | 8 | +++ | + |
| 4513 | 58; 4425 | 4443 | 13 | 4427 | 8 | +++ | + |
| 4525 | 58; 4425 | 4445 | 14 | 4427 | 8 | ++++ | + |
| 4530 | 58; 4425 | 4447 | 15 | 4427 | 8 | +++ | + |
| 4568 | 58; 4425 | 4451 | 17 | 4427 | 8 | +++ | + |
| 4597 | 58; 4425 | 4453 | 18 | 4427 | 8 | ++++ | ++ |
| 4682 | 58; 4425 | 4455 | 21 | 4427 | 8 | +++ | + |
| 4498 | 58; 4425 | 4437 | 10 | 4428 | 9 | +++ | + |
| 4505 | 58; 4425 | 4439 | 11 | 4428 | 9 | +++ | + |
| 4512 | 58; 4425 | 4442 | 12 | 4428 | 9 | ++++ | + |
| 4526 | 58; 4425 | 4443 | 13 | 4428 | 9 | ++++ | + |
| 4538 | 58; 4425 | 4445 | 14 | 4428 | 9 | ++++ | ++ |
| 4547 | 58; 4425 | 4447 | 15 | 4428 | 9 | ++++ | ++ |
| 4583 | 58; 4425 | 4451 | 17 | 4428 | 9 | ++++ | ++ |
| 4617 | 58; 4425 | 4453 | 18 | 4428 | 9 | ++++ | ++ |
| 4718 | 58; 4425 | 4455 | 21 | 4428 | 9 | ++++ | ++ |
| 4502 | 58; 4425 | 4437 | 10 | 4429 | 10 | +++ | + |
| 4511 | 58; 4425 | 4439 | 11 | 4429 | 10 | +++ | + |
| 4521 | 58; 4425 | 4442 | 12 | 4429 | 10 | +++ | + |
| 4543 | 58; 4425 | 4443 | 13 | 4429 | 10 | +++ | + |
| 4561 | 58; 4425 | 4445 | 14 | 4429 | 10 | ++++ | ++ |
| 4581 | 58; 4425 | 4447 | 15 | 4429 | 10 | ++++ | ++ |
| 4626 | 58; 4425 | 4451 | 17 | 4429 | 10 | ++++ | ++ |
| 4651 | 58; 4425 | 4453 | 18 | 4429 | 10 | ++++ | ++ |
| 4739 | 58; 4425 | 4455 | 21 | 4429 | 10 | +++ | ++ |
| 4515 | 58; 4425 | 4437 | 10 | 4430 | 11 | +++ | + |
| 4523 | 58; 4425 | 4439 | 11 | 4430 | 11 | +++ | + |
| 4537 | 58; 4425 | 4442 | 12 | 4430 | 11 | ++++ | + |
| 4557 | 58; 4425 | 4443 | 13 | 4430 | 11 | +++ | + |
| 4567 | 58; 4425 | 4445 | 14 | 4430 | 11 | ++++ | ++ |
| 4584 | 58; 4425 | 4447 | 15 | 4430 | 11 | ++++ | ++ |
| 4639 | 58; 4425 | 4451 | 17 | 4430 | 11 | ++++ | ++ |
| 4662 | 58; 4425 | 4453 | 18 | 4430 | 11 | ++++ | ++ |
| 4776 | 58; 4425 | 4455 | 21 | 4430 | 11 | +++ | ++ |
| 4528 | 58; 4425 | 4437 | 10 | 4431 | 12 | +++ | + |
| 4535 | 58; 4425 | 4439 | 11 | 4431 | 12 | ++++ | + |
| 4552 | 58; 4425 | 4442 | 12 | 4431 | 12 | ++++ | + |
| 4570 | 58; 4425 | 4443 | 13 | 4431 | 12 | ++++ | + |
| 4596 | 58; 4425 | 4445 | 14 | 4431 | 12 | +++ | +++ |
| 4621 | 58; 4425 | 4447 | 15 | 4431 | 12 | +++ | + |
| 4676 | 58; 4425 | 4451 | 17 | 4431 | 12 | ++++ | ++ |
| 4702 | 58; 4425 | 4453 | 18 | 4431 | 12 | +++ | + |
| 4795 | 58; 4425 | 4455 | 21 | 4431 | 12 | +++ | + |
| 4539 | 58; 4425 | 4437 | 10 | 4432 | 13 | +++ | + |
| 4546 | 58; 4425 | 4439 | 11 | 4432 | 13 | ++++ | + |
| 4573 | 58; 4425 | 4442 | 12 | 4432 | 13 | ++++ | + |
| 4585 | 58; 4425 | 4443 | 13 | 4432 | 13 | ++++ | ++ |
| 4630 | 58; 4425 | 4445 | 14 | 4432 | 13 | ++++ | ++ |
| 4660 | 58; 4425 | 4447 | 15 | 4432 | 13 | ++++ | +++ |
| 4714 | 58; 4425 | 4451 | 17 | 4432 | 13 | ++++ | ++ |
| 4751 | 58; 4425 | 4453 | 18 | 4432 | 13 | ++++ | ++ |
| 4820 | 58; 4425 | 4455 | 21 | 4432 | 13 | +++ | ++ |
| 4549 | 58; 4425 | 4437 | 10 | 4433 | 14 | +++ | + |
| 4574 | 58; 4425 | 4439 | 11 | 4433 | 14 | ++++ | ++ |
| 4582 | 58; 4425 | 4442 | 12 | 4433 | 14 | ++++ | ++ |
| 4625 | 58; 4425 | 4443 | 13 | 4433 | 14 | ++++ | + |
| 4646 | 58; 4425 | 4445 | 14 | 4433 | 14 | ++++ | ++ |
| 4670 | 58; 4425 | 4447 | 15 | 4433 | 14 | ++++ | ++ |
| 4725 | 58; 4425 | 4451 | 17 | 4433 | 14 | ++++ | +++ |
| 4784 | 58; 4425 | 4453 | 18 | 4433 | 14 | ++++ | ++ |
| 4857 | 58; 4425 | 4455 | 21 | 4433 | 14 | +++ | ++ |
| 4578 | 58; 4425 | 4437 | 10 | 4434 | 15 | +++ | + |
| 4604 | 58; 4425 | 4439 | 11 | 4434 | 15 | +++ | + |
| 4620 | 58; 4425 | 4442 | 12 | 4434 | 15 | ++++ | + |
| 4659 | 58; 4425 | 4443 | 13 | 4434 | 15 | +++ | + |
| 4677 | 58; 4425 | 4445 | 14 | 4434 | 15 | ++++ | ++ |
| 4717 | 58; 4425 | 4447 | 15 | 4434 | 15 | ++++ | ++ |
| 4760 | 58; 4425 | 4451 | 17 | 4434 | 15 | +++ | ++ |
| 4802 | 58; 4425 | 4453 | 18 | 4434 | 15 | +++ | ++ |
| 4874 | 58; 4425 | 4455 | 21 | 4434 | 15 | +++ | ++ |
| 4587 | 58; 4425 | 4437 | 10 | 4435 | 16 | ++ | + |
| 4606 | 58; 4425 | 4439 | 11 | 4435 | 16 | +++ | + |
| 4654 | 58; 4425 | 4442 | 12 | 4435 | 16 | ++++ | + |
| 4673 | 58; 4425 | 4443 | 13 | 4435 | 16 | +++ | + |
| 4698 | 58; 4425 | 4445 | 14 | 4435 | 16 | ++++ | + |
| 4737 | 58; 4425 | 4447 | 15 | 4435 | 16 | ++++ | ++ |
| 4804 | 58; 4425 | 4451 | 17 | 4435 | 16 | +++ | ++ |
| 4822 | 58; 4425 | 4453 | 18 | 4435 | 16 | +++ | ++ |
| 4902 | 58; 4425 | 4455 | 21 | 4435 | 16 | +++ | ++ |
| 4632 | 58; 4425 | 4437 | 10 | 4436 | 17 | ++ | + |
| 4656 | 58; 4425 | 4439 | 11 | 4436 | 17 | +++ | + |
| 4689 | 58; 4425 | 4442 | 12 | 4436 | 17 | ++++ | + |
| 4711 | 58; 4425 | 4443 | 13 | 4436 | 17 | +++ | + |
| 4746 | 58; 4425 | 4445 | 14 | 4436 | 17 | ++++ | ++ |
| 4780 | 58; 4425 | 4447 | 15 | 4436 | 17 | ++++ | ++ |
| 4841 | 58; 4425 | 4451 | 17 | 4436 | 17 | +++ | ++ |
| 4860 | 58; 4425 | 4453 | 18 | 4436 | 17 | +++ | ++ |
| 4915 | 58; 4425 | 4455 | 21 | 4436 | 17 | +++ | ++ |

¹Indicated PEgRNA sequence does not contain the 3′ mU*mU*mU*U and 5′mN*mN*mN* modifications used experimentally, where m indicates that the indicated nucleotide contains a 2′-O-Me modification and a * indicates a phosphorothioate bond.
²+ = 0-0.72%, ++ = 0.72%-2.33%, +++ = 2.33%-11.14%, ++++ = 11.14%-22.15%

### Example 8—Phenotypic Rescue by Prime Editing

[0458] Patient Fibroblast cells (GM05798) harboring homozygous H1069Q mutation were obtained from Coriell Institute. Fibroblast cells were propagated in EMEM with 15% FBS (not HI). 10 K cells were plated in 96-well plate and twenty-fours later cells were transfected with Messenger Max according to the manufacturer's directions with mRNA encoding a prime editor fusion protein, PEgRNA and NgRNA. Following transfection, the cells were challenged with copper (Cu) at a concentration of 500 uM. Twenty-four hours later, phenotypic rescue of the edited was measured by cell viability assay using cell titer glow from Promega according to the manufacture's protocol. The viability of the edited cells was normalized to the transfected cells with 0 Cu treatment and the phenotypic recue was measured relative to the untransfected cells challenged with the Cu at 500 uM. Editing of these cells were measured in parallel by harvesting cells in quick DNA extract for high throughput sequencing and sequenced using miseq.

[0459] The correlation between the percent correction and percent cell viability rescue data sets was analyzed assuming Gaussian distribution yielding Pearson correlation coefficients of 0.8970 with 95% confidence interval and R² value of 0.80. The P-value<0.0001 was calculated using 2-tailed test with 95% confidence interval. These data and analyses show that the level of phenotypic rescue in patient fibroblast cell populations correlates positively with percent correction observed in those populations.

TABLE XI
Phenotypic Rescue in Patient Fibroblast cells

| RNA Dose Level | Percent | Percent Cell |
|---|---|---|
| (1-high to 20-low) | Correction¹ | Viability Rescue² |
| 1 | ++++ | ++++ |
| 2 | ++++ | ++++ |
| 3 | ++++ | ++++ |
| 4 | ++++ | ++++ |
| 5 | ++++ | ++++ |
| 6 | ++++ | ++++ |
| 7 | +++ | +++ |
| 8 | +++ | +++ |
| 9 | +++ | ++ |
| 10 | +++ | +++ |
| 11 | +++ | +++ |
| 12 | ++ | ++ |
| 13 | ++ | + |
| 14 | ++ | ++ |
| 15 | ++ | + |
| 16 | ++ | ++ |
| 17 | + | + |
| 18 | + | +++ |
| 19 | + | ++ |
| 20 | + | + |
| 21 | + | + |

¹+ = 0.06-0.48%, ++ = 0.48%-3.84%, + ++ = 3.84%-30.05%, +++ + = 30.05%-47.97%
²+ = −10.3-5.14%, ++ = 5.14%-11.4%, +++ = 11.4%-31.58%, ++++ = 31.58%-55.66%

### Example 9—Prime Editing at the Endogenous ATP7B H1069 Mutation Site in HEK293T Cells Using Synthetic PEgRNA and ngRNA

[0460] A PE3 screen measuring percent correction and percent indels was performed at the endogenous ATP7B H1069Q locus. The cells were transfected with mRNA encoding a prime editor, and synthetic PEgRNA and ngRNA, as described in Example 1.

[0461] The results of the PE3 screen are provided in Tables XEa-XEe. Below each of Tables XEa-XEe is a table summarizing the PEgRNAs used experimentally. Each of the PEgRNA were tested in combination with multiple ngRNA. Some of the ngRNA were designed for a PE3B strategy and contain spacers complementary to the portion of the edit strand containing the edit. These results demonstrate the successful correction of the H1069Q mutation at the endogenous ATP7B locus in mammalian cells using both PE3 and PE3B Prime Editing systems.

TABLE Ya
PE3 screen at the H1069 mutation site in HEK293T
cells with synthetic PEgRNA and ngRNA

| | | PEgRNA² SEQ ID NO: | | | | | | | | | |
|---|---|---|---|---|---|---|---|---|---|---|---|
| | | 4499 | | 4533 | | 4522 | | 4518 | | 4540 | |
| | | % | % | % | % | % | % | % | % | % | % |
| | | Edit¹ | indel¹ | Edit¹ | indel¹ | Edit¹ | indel¹ | Edit¹ | indel¹ | Edit¹ | indel¹ |
| ngRNA² | PE2 | +++ | + | +++ | + | +++ | + | +++ | + | ++++ | + |
| SEQ | 2257 | +++ | + | ++++ | ++ | ++++ | + | +++ | ++ | ++++ | ++ |
| ID | 2268 | ++++ | ++ | ++++ | ++ | ++++ | ++ | ++++ | + | ++++ | + |
| NO: | 2264 | +++ | + | ++++ | + | ++++ | ++ | ++++ | + | ++++ | + |
| | 2261 | ++ | ++ | +++ | ++ | +++ | ++ | +++ | ++ | +++ | +++ |
| | 2274 | ++ | +++ | ++++ | +++ | +++ | +++ | +++ | ++ | ++++ | ++ |
| | 2269 | +++ | ++ | ++++ | +++ | +++ | +++ | +++ | ++ | +++ | ++ |
| | 2270 | ++ | ++ | ++++ | ++ | ++++ | ++ | +++ | + | ++++ | ++ |
| | 2265 | +++ | ++ | ++++ | ++ | ++++ | ++ | ++++ | ++ | ++++ | ++ |
| | 2260 | +++ | ++ | ++++ | ++ | ++++ | ++ | ++++ | ++ | ++++ | ++ |
| | 2272 | +++ | ++ | ++++ | ++ | ++++ | ++ | +++ | + | ++++ | ++ |
| | 4415 | ++ | + | ++++ | + | ++++ | + | +++ | + | +++ | + |
| | 4414 | +++ | + | ++++ | + | ++++ | + | ++++ | + | ++++ | + |
| | 4414 | ++++ | + | ++++ | + | ++++ | + | ++++ | + | ++++ | + |
| | 4412 | ++++ | + | ++++ | + | + | + | ++++ | + | ++++ | + |
| | 4412 | +++ | + | ++++ | + | ++++ | + | ++++ | + | ++++ | + |

4. + = 0.1%-2.0%; ++ = 2.0%-11.7%; +++ = 11.7%-34.85%; ++++ = 20.3%-55.9%

### Summary of PEgRNA Used:

| | | | | PBS | |
|---|---|---|---|---|---|
| PEgRNA² | Spacer | RTT³ | RTT | SEQ | PBS |
| SEQ ID NO: | SEQ ID NO: | SEQ ID NO: | Length | ID NO: | Length |
| 4499 | 58 | 4438 | 10 | 4428 | 9 |
| 4533 | 58 | 4444 | 13 | 4429 | 10 |
| 4522 | 58 | 4446 | 14 | 4427 | 8 |
| 4518 | 58 | 4448 | 15 | 4426 | 7 |
| 4540 | 58 | 4448 | 15 | 4427 | 8 |

5. Indicated sequence does not contain the 3′ linker and hairpin motif used experimentally. The experimental PEgRNA further contained 3′ mN*mN*mN*N and 5′mN*mN*mN* modifications, where m
indicates that the nucleotide contains a 2′-O—Me modification and a * indicates a phosphorothioate
bond .. The first 20 nt of the ngRNA sequence are the spacer; italics indicate that the spacer is a PE3B
spacer.
6. * = RTT contains a PAM silencing mutation.

TABLE Yb
PE3 screen at the H1069 mutation site in HEK293T
cells with synthetic PERNA and ngRNA

| | | PEgRNA² SEQ ID NO: | | | | | | | | | |
|---|---|---|---|---|---|---|---|---|---|---|---|
| | | 4657 | | 4691 | | 4560 | | # | | 4603 | |
| | | % | % | % | % | % | % | % | % | % | % |
| | | Edit¹ | indel¹ | Edit¹ | indel¹ | Edit¹ | indel¹ | Edit¹ | indel¹ | Edit¹ | indel¹ |
| ngRNA² | PE2 | +++ | + | +++ | + | +++ | + | +++ | + | ++++ | + |
| SEQ | 2257 | ++++ | ++ | ++++ | ++ | +++ | ++ | +++ | + | ++++ | ++ |
| ID | 2268 | ++++ | ++ | ++++ | ++ | ++++ | + | ++++ | + | ++++ | ++ |
| NO: | 2264 | ++++ | + | ++++ | + | ++++ | + | ++++ | + | ++++ | + |
| | 2261 | +++ | ++ | +++ | ++ | +++ | ++ | +++ | ++ | ++++ | ++ |
| | 2274 | +++ | ++ | +++ | ++ | +++ | ++ | +++ | ++ | ++++ | ++ |
| | 2269 | +++ | +++ | ++++ | +++ | +++ | ++ | +++ | ++ | +++ | ++ |
| | 2270 | ++++ | ++ | ++++ | ++ | ++++ | ++ | +++ | ++ | ++++ | ++ |
| | 2265 | ++++ | ++ | ++++ | ++ | ++++ | ++ | +++ | ++ | ++++ | ++ |
| | 2260 | ++++ | ++ | ++++ | ++ | ++++ | ++ | +++ | ++ | ++++ | ++ |
| | 2272 | ++++ | ++ | +++ | ++ | +++ | ++ | +++ | + | ++++ | ++ |
| | 4415 | ++++ | + | ++++ | + | +++ | + | +++ | + | ++++ | + |
| | 4414 | ++++ | + | ++++ | + | ++++ | + | ++++ | + | ++++ | + |
| | 4414 | ++++ | + | ++++ | + | ++++ | + | ++++ | + | ++++ | + |
| | 4412 | ++++ | + | ++++ | + | ++++ | + | ++++ | + | ++++ | + |
| | 4412 | ++++ | + | ++++ | + | ++++ | + | ++++ | + | ++++ | + |

¹+ = 0.1%-2.0%; ++ = 2.0%-11.7%; +++ = 11.7%-34.85%; ++++ = 20.3%-55.9%

### Summary of PEgRNA Used:

| | | | | PBS | |
|---|---|---|---|---|---|
| PEgRNA² | Spacer | RTT³ | RTT | SEQ | PBS |
| SEQ ID NO: | SEQ ID NO: | SEQ ID NO: | Length | ID NO: | Length |
| 4657 | 58 | 4448 | 15 | 4432 | 13 |
| 4691 | 58 | 4448 | 15 | 4433 | 14 |
| 4560 | 58 | 4449 | 16 | 4427 | 8 |
| # | 58 | 4449 | 16 | 4433 | 14 |
| 4603 | 58 | 4450 | 17 | 4428 | 9 |

²Indicated sequence does not contain the 3′ linker and hairpin motif used experimentally. The experimental PEgRNA further contained 3′ mN*mN*mN*N and 5′mN*mN*mN* modifications, where m indicates that the nucleotide contains a 2′-O—Me modification and a * indicates a phosphorothioate bond. The first 20 nt of the ngRNA sequence are the spacer; italics indicate that the spacer is a PE3B spacer.
³* = RTT contains a PAM silencing mutation.

TABLE Yc
PE3 screen at the H1069 mutation site in HEK293T
cells with synthetic PEgRNA and ngRNA

| | | PEgRNA² SEQ ID NO: | | | | | | | | | |
|---|---|---|---|---|---|---|---|---|---|---|---|
| | | 4719 | | 4649 | | 4592 | | 4592 | | 4624 | |
| | | % | % | % | % | % | % | % | % | % | % |
| | | Edit¹ | indel¹ | Edit¹ | indel¹ | Edit¹ | indel¹ | Edit¹ | indel¹ | Edit¹ | indel¹ |
| ngRNA² | PE2 | +++ | + | +++ | + | +++ | + | +++ | + | +++ | + |
| SEQ | 2257 | +++ | ++ | +++ | + | +++ | + | +++ | + | ++++ | ++ |
| ID | 2268 | ++++ | ++ | ++++ | + | ++++ | + | ++++ | ++ | ++++ | ++ |
| NO: | 2264 | ++++ | + | ++++ | + | ++++ | + | ++++ | + | ++++ | + |
| | 2261 | +++ | ++ | +++ | ++ | +++ | ++ | +++ | ++ | ++++ | +++ |
| | 2274 | +++ | ++ | +++ | ++ | +++ | ++ | +++ | ++ | +++ | +++ |
| | 2269 | +++ | ++ | +++ | ++ | | | +++ | ++ | +++ | +++ |
| | 2270 | +++ | + | +++ | ++ | +++ | + | +++ | ++ | ++++ | ++ |
| | 2265 | ++++ | ++ | ++++ | ++ | ++++ | ++ | +++ | ++ | ++++ | ++ |
| | 2260 | ++++ | ++ | ++++ | ++ | +++ | ++ | ++++ | ++ | ++++ | ++ |
| | 2272 | ++++ | ++ | +++ | + | +++ | ++ | +++ | ++ | ++++ | ++ |
| | 4415 | ++++ | + | +++ | + | | | | | ++++ | + |
| | 4414 | ++++ | + | ++++ | + | ++++ | + | ++++ | + | ++++ | + |
| | 4414 | ++++ | + | ++++ | ++ | ++++ | + | ++++ | + | ++++ | + |
| | 4412 | ++++ | + | ++++ | + | ++++ | + | ++++ | + | ++++ | + |
| | 4412 | ++++ | + | ++++ | + | ++++ | + | ++++ | + | ++++ | + |

¹+ = 0.1%-2.0%; ++ = 2.0%-11.7%; +++ = 11.7%-34.85%; ++++ = 20.3%-55.9%

### Summary of PEgRNA Used:

| | | | | PBS | |
|---|---|---|---|---|---|
| PEgRNA² | Spacer | RTT³ | RTT | SEQ | PBS |
| SEQ ID NO: | SEQ ID NO: | SEQ ID NO: | Length | ID NO: | Length |
| 4719 | 58 | 4450 | 17 | 4432 | 13 |
| 4649 | 58 | 4452 | 18 | 4429 | 10 |
| 4592 | 58 | 4441 | 12 | 4433 | 14 |
| 4592 | 58 | 4441 | 12 | 4433 | 14 |
| 4624 | 58 | 4448 | 15 | 4431 | 12 |

²Indicated sequence does not contain the 3′ linker and hairpin motif used experimentally. The experimental PEgRNA further contained 3′ mN*mN*mN*N and 5′mN*mN*mN* modifications, where m indicates that the nucleotide contains a 2′-O—Me modification and a * indicates a phosphorothioate bond. The first 20 nt of the ngRNA sequence are the spacer; italics indicate that the spacer is a PE3B spacer.
³* = RTT contains a PAM silencing mutation.

TABLE Yd
PE3 screen at the H1069 mutation site in HEK293T
cells with synthetic PEgRNA and ngRNA

| | | PEgRNA² SEQ ID NO: | | | | | | | | | |
|---|---|---|---|---|---|---|---|---|---|---|---|
| | | 4624 | | 4720 | | 4720 | | 4852 | | 4852 | |
| | | % | % | % | % | % | % | % | % | % | % |
| | | Edit¹ | indel¹ | Edit¹ | indel¹ | Edit¹ | indel¹ | Edit¹ | indel¹ | Edit¹ | indel¹ |
| ngRNA² | PE2 | +++ | + | +++ | + | +++ | + | +++ | + | +++ | + |
| SEQ | 2257 | +++ | ++ | +++ | ++ | +++ | ++ | +++ | ++ | +++ | + |
| ID | 2268 | ++++ | + | ++++ | ++ | ++++ | ++ | ++++ | + | ++++ | + |
| NO: | 2264 | ++++ | + | ++++ | + | ++++ | + | ++++ | + | ++++ | + |
| | 2261 | +++ | ++ | +++ | ++ | +++ | ++ | +++ | ++ | +++ | ++ |
| | 2274 | +++ | ++ | +++ | ++ | +++ | ++ | +++ | ++ | +++ | ++ |
| | 2269 | +++ | ++ | +++ | ++ | +++ | ++ | | | +++ | ++ |
| | 2270 | +++ | + | +++ | ++ | +++ | ++ | | | | |
| | 2265 | +++ | ++ | +++ | ++ | +++ | ++ | | | ++++ | ++ |
| | 2260 | ++++ | ++ | +++ | ++ | +++ | + | ++++ | ++ | ++++ | ++ |
| | 2272 | +++ | ++ | +++ | ++ | +++ | + | ++++ | ++ | +++ | ++ |
| | 4415 | +++ | + | +++ | + | +++ | + | | | | |
| | 4414 | ++++ | + | ++++ | + | ++++ | + | | | | |
| | 4414 | ++++ | + | ++++ | + | ++++ | + | ++++ | + | ++++ | + |
| | 4412 | ++++ | ++ | ++++ | + | ++++ | + | | | | |
| | 4412 | ++++ | + | ++++ | + | ++++ | + | ++++ | + | ++++ | + |

¹+ = 0.1%-2.0%; ++ = 2.0%-11.7%; +++ = 11.7%-34.85%; ++++ = 20.3%-55.9%

### Summary of PEgRNA Used:

| | | | | PBS | |
|---|---|---|---|---|---|
| PEgRNA² | Spacer | RTT³ | RTT | SEQ | PBS |
| SEQ ID NO: | SEQ ID NO: | SEQ ID NO: | Length | ID NO: | Length |
| 4624 | 58 | 4448 | 15 | 4431 | 12 |
| 4720 | 58 | 4448 | 15 | 4434 | 15 |
| 4720 | 58 | 4448 | 15 | 4434 | 15 |
| 4852 | 58 | 4456 | 21 | 4433 | 14 |
| 4852 | 58 | 4456 | 21 | 4433 | 14 |

²Indicated sequence does not contain the 3′ linker and hairpin motif used experimentally. The experimental PEgRNA further contained 3′ mN*mN*mN*N and 5′mN*mN*mN* modifications, where m indicates that the nucleotide contains a 2′-O—Me modification and a * indicates a phosphorothioate bond. The first 20 nt of the ngRNA sequence are the spacer; italics indicate that the spacer is a PE3B spacer.
³* = RTT contains a PAM silencing mutation.

TABLE Ye
PE3 screen at the H1069 mutation site in HEK293T
cells with synthetic PEgRNA and ngRNA

| | | PEgRNA² SEQ ID NO: | | | | | | | | | |
|---|---|---|---|---|---|---|---|---|---|---|---|
| | | 2548 | | 2557 | | 2582 | | 2633 | | ## | |
| | | % | % | % | % | % | % | % | % | % | % |
| | | Edit¹ | indel¹ | Edit¹ | indel¹ | Edit¹ | indel¹ | Edit¹ | indel¹ | Edit¹ | indel¹ |
| ngRNA² | PE2 | +++ | + | | | +++ | + | +++ | + | +++ | ++ |
| SEQ | 2257 | +++ | ++ | +++ | ++ | +++ | ++ | +++ | ++ | +++ | + |
| ID | 2268 | ++++ | + | ++++ | + | ++++ | ++ | ++++ | ++ | ++++ | + |
| NO: | 2264 | ++++ | + | ++++ | + | ++++ | + | ++++ | + | ++++ | + |
| | 2261 | +++ | ++ | +++ | ++ | +++ | ++ | +++ | ++ | +++ | ++ |
| | 2274 | +++ | ++ | +++ | ++ | +++ | ++ | +++ | ++ | +++ | ++ |
| | 2269 | +++ | ++ | +++ | ++ | +++ | ++ | +++ | +++ | +++ | ++ |
| | 2270 | +++ | ++ | +++ | ++ | +++ | + | +++ | ++ | +++ | + |
| | 2265 | +++ | ++ | +++ | ++ | +++ | ++ | +++ | ++ | +++ | + |
| | 2260 | +++ | ++ | +++ | ++ | +++ | ++ | +++ | ++ | +++ | ++ |
| | 2272 | +++ | ++ | +++ | + | +++ | ++ | +++ | ++ | +++ | ++ |
| | 4415 | +++ | + | +++ | + | +++ | + | +++ | ++ | +++ | + |
| | 4414 | ++++ | + | ++++ | + | ++++ | ++ | ++++ | + | +++ | + |
| | 4414 | ++++ | + | ++++ | + | | | ++++ | + | ++++ | + |
| | 4412 | ++++ | + | ++++ | + | ++++ | + | ++++ | + | +++ | + |
| | 4412 | +++ | + | ++++ | + | ++++ | + | ++++ | ++ | +++ | + |

¹+ = 0.1%-2.0%; ++ = 2.0%-11.7%; +++ = 11.7%-34.85%; ++++ = 20.3%-55.9%

### Summary of PEgRNA Used:

| | | | | PBS | |
|---|---|---|---|---|---|
| PEgRNA² | Spacer | RTT³ | RTT | SEQ | PBS |
| SEQ ID NO: | SEQ ID NO: | SEQ ID NO: | Length | ID NO: | Length |
| 2548 | 33 | 2329 | 15 | 2295 | 8 |
| 2557 | 33 | 2335 | 16 | 2295 | 8 |
| 2582 | 33 | 2335 | 16 | 2296 | 9 |
| 2633 | 33 | 2335 | 16 | 2297 | 10 |
| ## | 33 | ## | 17 | 2295 | 8 |

²Indicated sequence does not contain the 3′ linker and hairpin motif used experimentally. The experimental PEgRNA further contained 3′ mN*mN*mN*N and 5′mN*mN*mN* modifications, where m indicates that the nucleotide contains a 2′-O—Me modification and a * indicates a phosphorothioate bond. The first 20 nt of the ngRNA sequence are the spacer; italics indicate that the spacer is a PE3B spacer.
³* = RTT contains a PAM silencing mutation.

TABLE Yf
PE3 screen at the H1069 mutation site in HEK293T
cells with synthetic PEgRNA and ngRNA

| | | PEgRNA² SEQ ID NO: | | | | | | | | | |
|---|---|---|---|---|---|---|---|---|---|---|---|
| | | 2957 | | 2871 | | 2568 | | 2645 | | 2551 | |
| | | % | % | % | % | % | % | % | % | % | % |
| | | Edit¹ | indel¹ | Edit¹ | indel¹ | Edit¹ | indel¹ | Edit¹ | indel¹ | Edit¹ | indel¹ |
| ngRNA² | PE2 | +++ | + | | + | ++ | + | ++ | ++ | +++ | + |
| SEQ | 2257 | +++ | + | +++ | + | ++++ | + | +++ | ++ | ++++ | + |
| ID | 2268 | ++++ | ++ | +++ | | ++++ | + | | | ++++ | ++ |
| NO: | 2264 | ++++ | + | +++ | + | ++++ | + | +++ | + | ++++ | + |
| | 2261 | +++ | ++ | ++ | ++ | +++ | ++ | +++ | ++ | ++++ | ++ |
| | 2274 | +++ | ++ | ++ | ++ | +++ | ++ | +++ | ++ | +++ | ++ |
| | 2269 | +++ | ++ | +++ | ++ | +++ | ++ | +++ | ++ | ++++ | ++ |
| | 2270 | +++ | ++ | ++ | + | ++++ | ++ | +++ | ++ | ++++ | ++ |
| | 2265 | +++ | ++ | +++ | + | ++++ | ++ | +++ | ++ | ++++ | ++ |
| | 2260 | +++ | ++ | +++ | + | +++ | ++ | +++ | ++ | ++++ | ++ |
| | 2272 | +++ | ++ | +++ | ++ | +++ | + | +++ | ++ | +++ | ++ |
| | 4415 | +++ | + | ++ | + | +++ | + | +++ | + | +++ | + |
| | 4414 | ++++ | + | +++ | + | ++++ | ++ | ++++ | ++ | ++++ | + |
| | 4414 | ++++ | + | +++ | + | ++++ | + | +++ | + | ++++ | ++ |
| | 4412 | ++++ | + | +++ | + | ++++ | ++ | ++++ | ++ | ++++ | + |
| | 4412 | ++++ | + | +++ | + | +++ | + | +++ | + | ++++ | + |

¹+ = 0.1%-2.0%; ++ = 2.0%-11.7%; +++ = 11.7%-34.85%; ++++ = 20.3%-55.9%

### Summary of PEgRNA Used:

| | | | | PBS | |
|---|---|---|---|---|---|
| PEgRNA² | Spacer | RTT³ | RTT | SEQ | PBS |
| SEQ ID NO: | SEQ ID NO: | SEQ ID NO: | Length | ID NO: | Length |
| 2957 | 33 | 2342 | 18 | 2300 | 13 |
| 2871 | 33 | 2353 | 22 | 2295 | 8 |
| 2568 | 33 | 2339* | 16 | 2295 | 8 |
| 2645 | 33 | 2339* | 16 | 2297 | 10 |
| 2551 | 33 | 2337* | 16 | 2295 | 8 |

²Indicated sequence does not contain the 3′ linker and hairpin motif used experimentally. The experimental PEgRNA further contained 3′ mN*mN*mN*N and 5′mN*mN*mN* modifications, where m indicates that the nucleotide contains a 2′-O—Me modification and a * indicates a phosphorothioate bond. The first 20 nt of the ngRNA sequence are the spacer; italics indicate that the spacer is a PE3B spacer.
³* = RTT contains a PAM silencing mutation.

### Wild-Type ATP7B Protein Sequence (SEO ID NO: 5861)

>sp|P35670|ATP7B_HUMAN Copper-transporting
ATPase 2 OS = Homo sapiens OX = 9606
GN = ATP7B PE = 1 SV = 4
MPEQERQITAREGASRKILSKLSLPTRAWEPAMKKSFAFDNVGYEGGLDG
LGPSSQVATSTVRILGMTCQSCVKSIEDRISNLKGIISMKVSLEQGSATV
KYVPSVVCLQQVCHQIGDMGFEASIAEGKAASWPSRSLPAQEAVVKLRVE
GMTCQSCVSSIEGKVRKLQGVVRVKVSLSNQEAVITYQPYLIQPEDLRDH
VNDMGFEAAIKSKVAPLSLGPIDIERLQSTNPKRPLSSANQNFNNSETLG
HQGSHVVTLQLRIDGMHCKSCVLNIEENIGQLLGVQSIQVSLENKTAQVK
YDPSCTSPVALQRAIEALPPGNFKVSLPDGAEGSGTDHRSSSSHSPGSPP
RNQVQGTCSTTLIAIAGMTCASCVHSIEGMISQLEGVQQISVSLAEGTAT
VLYNPSVISPEELRAAIEDMGFEASVVSESCSTNPLGNHSAGNSMVQTTD
GTPTSVQEVAPHTGRLPANHAPDILAKSPQSTRAVAPQKCFLQIKGMTCA
SCVSNIERNLQKEAGVLSVLVALMAGKAEIKYDPEVIQPLEIAQFIQDLG
FEAAVMEDYAGSDGNIELTITGMTCASCVHNIESKLTRINGITYASVALA
TSKALVKFDPEIIGPRDIIKIIEEIGFHASLAQRNPNAHHLDHKMEIKQW
KKSFLCSLVFGIPVMALMIYMLIPSNEPHQSMVLDHNIIPGLSILNLIFF
ILCTFVQLLGGWYFYVQAYKSLRHRSANMDVLIVLATSIAYVYSLVILVV
AVAEKAERSPVTFFDTPPMLFVFIALGRWLEHLAKSKTSEALAKLMSLQA
TEATVVTLGEDNLIIREEQVPMELVQRGDIVKVVPGGKFPVDGKVLEGNT
MADESLITGEAMPVTKKPGSTVIAGSINAHGSVLIKATHVGNDTTLAQIV
KLVEEAQMSKAPIQQLADRFSGYFVPFIIIMSTLTLVVWIVIGFIDFGVV
QRYFPNPNKHISQTEVIIRFAFQTSITVLCIACPCSLGLATPTAVMVGTG
VAAQNGILIKGGKPLEMAHKIKTVMFDKTGTITHGVPRVMRVLLLGDVAT
LPLRKVLAVVGTAEASSEHPLGVAVTKYCKEELGTETLGYCTDFQAVPGC
GIGCKVSNVEGILAHSERPLSAPASHLNEAGSLPAEKDAVPQTFSVLIGN
REWLRRNGLTISSDVSDAMTDHEMKGQTAILVAIDGVLCGMIAIADAVKQ
EAALAVHTLQSMGVDVVLITGDNRKTARAIATQVGINKVFAEVLPSHKVA
KVQELQNKGKKVAMVGDGVNDSPALAQADMGVAIGTGTDVAIEAADVVLI
RNDLLDVVASIHLSKRTVRRIRINLVLALIYNLVGIPIAAGVFMPIGIVL
QPWMGSAAMAASSVSVVLSSLQLKCYKKPDLERYEAQAHGHMKPLTASQV
SVHIGMDDRWRDSPRATPWDQVSYVSQVSLSSLTSDKPSRHSAAADDDGD
KWSLLLNGRDEEQYI

1. A prime editing guide RNA (PEgRNA) comprising:
a. a spacer that is complementary to a search target sequence on a first strand of an ATP7B gene, wherein the spacer comprises at its 3′ end nucleotides 5-20 of SEQ ID NO: 4425;
b. a gRNA core capable of binding to a Cas9 protein;
c. an extension arm comprising:
i. an editing template that comprises a region of complementarity to an editing target sequence on a second strand of the ATP7B gene, and
ii. a primer binding site that comprises at its 5′ end a sequence that is a reverse complement of nucleotides 15-17 of SEQ ID NO: 4425;
wherein the first strand and second strand are complementary to each other and wherein the editing target sequence on the second strand is complementary to a portion of the ATP7B gene comprising a c.3207C>A substitution.

2. (canceled)

3. The PEgRNA of claim 1, wherein the spacer of the PEgRNA is from 15 to 22 nucleotides in length.

4. The PEgRNA of claim 1, wherein the spacer of the PEgRNA comprises at its 3′ end nucleotides 4-20, 3-20, 2-20, or 1-20 of SEQ ID NO: 4425.

5. The PEgRNA of claim 1, wherein the spacer of the PEgRNA comprises at its 3′ end SEQ ID NO: 4425.

6. The PEgRNA of claim 1, wherein the spacer of the PEgRNA is 20 nucleotides in length.

7. The PEgRNA of claim 1, comprising from 5′ to 3′, the spacer, the gRNA core, the RTT, and the PBS.

8. The PEgRNA of claim 7, wherein the spacer, the gRNA core, the RTT, and the PBS form a contiguous sequence in a single molecule.

9. The PEgRNA of claim 1, comprising a pegRNA sequence selected from any one of: SEQ ID NOs: 2445, 2446, 2447, 2448, 2449, 2450, 2452, 2453, 2454, 2455, 2456, 2457, 2458, 2459, 2460, 2461, 2462, 2463, 2464, 2465, 2466, 2467, 2468, 2469, 2470, 2471, 2472, 2473, 2474, 2475, 2476, 2477, 2478, 2479, 2480, 2481, 2482, 2483, 2484, 2485, 2486, 2487, 2488, 2489, 2490, 2491, 2492, 2493, 2494, 2495, 2496, 2497, 2498, 2499, 2500, 2501, 2502, 2503, 2504, 2505, 2506, 2507, 2508, 2509, 2510, 2511, 2512, 2513, 2514, 2515, 2516, 2517, 2518, 2519, 2520, 2521, 2522, 2523, 2524, 2525, 2526, 2527, 2528, 2529, 2530, 2531, 2532, 2533, 2534, 2535, 2538, 2539, 2540, 2541, 2542, 2543, 2544, 2545, 2546, 2547, 2548, 2549, 2550, 2551, 2553, 2554, 2555, 2556, 2557, 2558, 2559, 2560, 2561, 2562, 2563, 2564, 2565, 2566, 2567, 2568, 2569, 2570, 2571, 2572, 2573, 2574, 2575, 2576, 2577, 2578, 2580, 2582, 2584, 2585, 2586, 2587, 2588, 2589, 2590, 2591, 2592, 2593, 2594, 2595, 2596, 2597, 2598, 2600, 2601, 2602, 2603, 2605, 2606, 2607, 2608, 2609, 2610, 2611, 2612, 2613, 2614, 2615, 2616, 2617, 2618, 2619, 2620, 2621, 2623, 2624, 2628, 2629, 2630, 2631, 2632, 2633, 2634, 2635, 2636, 2637, 2638, 2643, 2645, 2646, 2647, 2648, 2649, 2650, 2651, 2652, 2653, 2654, 2655, 2656, 2657, 2658, 2659, 2660, 2663, 2664, 2665, 2667, 2668, 2669, 2670, 2671, 2672, 2674, 2675, 2676, 2677, 2678, 2680, 2681, 2683, 2685, 2687, 2688, 2689, 2690, 2692, 2694, 2695, 2696, 2697, 2699, 2701, 2702, 2704, 2706, 2708, 2711, 2713, 2715, 2716, 2717, 2720, 2721, 2722, 2723, 2725, 2726, 2727, 2728, 2729, 2730, 2733, 2734, 2735, 2744, 2747, 2748, 2749, 2752, 2753, 2757, 2758, 2759, 2760, 2761, 2762, 2764, 2765, 2768, 2769, 2770, 2772, 2773, 2774, 2777, 2786, 2788, 2789, 2790, 2791, 2792, 2793, 2794, 2795, 2796, 2797, 2798, 2799, 2800, 2801, 2802, 2807, 2810, 2811, 2812, 2814, 2816, 2824, 2825, 2826, 2828, 2829, 2830, 2832, 2833, 2834, 2841, 2842, 2843, 2844, 2846, 2847, 2854, 2855, 2856, 2857, 2862, 2864, 2866, 2867, 2868, 2869, 2870, 2871, 2885, 2886, 2887, 2888, 2889, 2890, 2891, 2893, 2894, 2896, 2898, 2899, 2901, 2902, 2909, 2910, 2914, 2916, 2918, 2919, 2920, 2926, 2927, 2932, 2933, 2937, 2938, 2939, 2941, 2942, 2945, 2953, 2954, 2956, 2957, 2960, 2962, 2963, 2964, 2965, 2967, 2972, 2973, 2977, 2979, 2980, 2982, 2983, 2988, 2991, 2993, 2994, 2995, 2997, 3006, 3008, 3012, 3013, 3015, 3023, 3024, 3027, 3028, 3029, 3030, 3031, 3032, 3033, 3034, 3035, 3036, 3037, 3038, 3039, 3043, 3044, 3045, 3046, 3048, 3049, 3050, 3051, 3052, 3053, 3054, 3055, 3059, 3064, 3065, 3071, 3072, 3075, 3076, 3080, 3082, 3084, 3093, 3096, 3098, 3099, 3101, 3119, 3121, 3122, 3123, 3124, 3126, 3128, 3130, 3133, 3142, 3144, 3148, 3159, 3161, 3162, 3163, 3164, 3165, 3166, 3168, 3169, 3170, 3176, 3182, 3188, 3190, 3191, 3195, 3200, 3202, 3203, 3210, 3212, 3216, 3218, 3226, 3227, 3228, 3229, 3230, 3231, 3232, 3234, 3235, 3238, 3239, 3241, 3243, 3244, 3245, 3246, 3247, 3248, 3249, 3250, 3260, 3262, 3263, 3271, 3273, 3275, 3281, 3282, 3283, 3287, 3288, 3289, 3300, 3301, 3302, 3303, 3304, 3305, 3307, 3310, 3311, 3312, 3313, 3314, 3315, 3316, 3317, 3318, 3322, 3324, 3325, 3328, 3330, 3346, 3347, 3348, 3349, 3350, 3358, 3359, 3362, 3364, 3365, 3366, 3367, 3368, 3372, 3373, 3382, 3385, 3387, 3388, 3389, 3390, 3391, 3392, 3393, 3400, 3403, 3404, 3405, 3407, 3408, 3409, 3412, 3414, 3420, 3423, 3425, 3426, 3427, 3428, 3429, 3430, 3431, 3434, 3438, 3441, 3442, 3446, 3449, 3450, 3451, 3452, 3453, 3454, 3455, 3463, 3466, 3469, 3470, 3471, 3472, 3473, 3474, 3477, 3478, 3480, 3481, 3482, 3487, 3490, 3494, 3498, 3499, 3502, 3503, 3505, 3506, 3508, 3509, 3510, 3511, 3513, 3520, 3522, 3523, 3526, 3529, 3533, 3535, 3536, 3542, 3543, 3546, 3547, 3549, 3550, 3553, 3554, 3555, 3557, 3560, 3561, 3563, 3564, 3567, 3568, 3569, 3571, 3574, 3575, 3576, 3578, 3579, 3580, 3581, 3583, 3584, 3585, 3592, 3594, 3595, 3596, 3597, 3603, 3612, 3613, 3617, 3622, 3625, 3626, 3627, 3628, 3630, 3631, 3632, 3633, 3635, 3636, 3638, 3639, 3640, 3641, 3642, 3646, 3647, 3648, 3654, 3657, 3659, 3660, 3661, 3664, 3668, 3669, 3673, 3674, 3678, 3679, 3680, 3681, 3684, 3685, 3687, 3688, 3697, 3699, 3702, 3703, 3704, 3705, 3706, 3708, 3710, 3711, 3712, 3714, 3715, 3721, 3722, 3724, 3725, 3728, 3729, 3730, 3731, 3732, 3733, 3734, 3735, 3736, 3737, 3739, 3740, 3741, 3743, 3744, 3746, 3748, 3755, 3761, 3770, 3771, 3773, 3774, 3776, 3778, 3779, 3781, 3782, 3784, 3785, 3792, 3793, 3794, 3795, 3796, 3797, 3798, 3799, 3800, 3801, 3802, 3803, 3804, 3805, 3806, 3807, 3808, 3809, 3810, 3811, 3812, 3814, 3815, 3816, 3820, 3829, 3839, 3841, 3842, 3843, 3844, 3845, 3851, 3852, 3853, 3854, 3855, 3856, 3857, 3858, 3859, 3860, 3861, 3862, 3863, 3864, 3865, 3868, 3869, 3871, 3874, 3875, 3876, 3877, 3878, 3879, 3880, 3882, 3883, 3884, 3885, 3887, 3895, 3899, 3904, 3907, 3908, 3909, 3910, 3911, 3912, 3913, 3914, 3915, 3916, 3917, 3921, 3924, 3927, 3928, 3929, 3931, 3932, 3935, 3936, 3937, 3938, 3939, 3940, 3941, 3942, 3943, 3945, 3946, 3956, 3957, 3961, 3962, 3965, 3971, 3977, 3978, 3979, 3980, 3981, 3982, 3983, 3985, 3988, 3989, 3990, 3991, 3992, 3993, 3994, 3995, 3997, 3998, 3999, 4001, 4002, 4003, 4004, 4009, 4011, 4012, 4013, 4015, 4016, 4017, 4020, 4021, 4023, 4025, 4026, 4028, 4029, 4031, 4032, 4034, 4035, 4036, 4037, 4038, 4040, 4052, 4055, 4056, 4060, 4061, 4066, 4067, 4070, 4077, 4078, 4080, 4081, 4082, 4083, 4084, 4085, 4086, 4087, 4088, 4089, 4090, 4102, 4105, 4106, 4108, 4109, 4110, 4114, 4115, 4117, 4118, 4119, 4128, 4129, 4132, 4136, 4137, 4142, 4147, 4159, 4163, 4168, 4170, 4171, 4172, 4173, 4175, 4182, 4183, 4186, 4188, 4192, 4194, 4199, 4208, 4225, 4226, 4227, 4228, 4232, 4239, 4240, or 4258.

10. The PEgRNA of claim 1, comprising a pegRNA sequence selected from any one of SEQ ID NOs: 4588, 4657, 4719, 4589, 4624, 4500, 4618, 4649, or 4533.

11. A prime editing guide RNA (PEgRNA) comprising:
a. a spacer that is complementary to a search target sequence on a first strand of an ATP7B gene, wherein the spacer comprises at its 3′ end nucleotides 5-20 of SEQ ID NO: 2293;
b. a gRNA core capable of binding to a Cas9 protein;
c. an extension arm comprising:
i. an editing template that comprises a region of complementarity to an editing target sequence on a second strand of the ATP7B gene, and
ii. a primer binding site that comprises at its 5′ end a sequence that is a reverse complement of nucleotides 15-17 of SEQ ID NO: 2293;
wherein the first strand and second strand are complementary to each other and wherein the editing target sequence on the second strand is complementary to a portion of the ATP7B gene comprising a c.3207C>A substitution.

12. (canceled)

13. The PEgRNA of claim 11, wherein the spacer of the PEgRNA is from 15 to 22 nucleotides in length.

14. The PEgRNA of claim 11, wherein the spacer of the PEgRNA comprises at its 3′ end nucleotides 4-20, 3-20, 2-20, or 1-20 of SEQ ID NO: 2293.

15. The PEgRNA of claim 11, wherein the spacer of the PEgRNA comprises at its 3′ end SEQ ID NO: 2293.

16. The PEgRNA of claim 11, wherein the spacer of the PEgRNA is 20 nucleotides in length.

17. The PEgRNA of claim 11, comprising from 5′ to 3′, the spacer, the gRNA core, the RTT, and the PBS.

18. The PEgRNA of claim 17, wherein the spacer, the gRNA core, the RTT, and the PBS form a contiguous sequence in a single molecule.

19. The PEgRNA of claim 17, comprising a pegRNA sequence selected from any one of: SEQ ID NOs: 2445, 2446, 2447, 2448, 2449, 2450, 2452, 2453, 2454, 2455, 2456, 2457, 2458, 2459, 2460, 2461, 2462, 2463, 2464, 2465, 2466, 2467, 2468, 2469, 2470, 2471, 2472, 2473, 2474, 2475, 2476, 2477, 2478, 2479, 2480, 2481, 2482, 2483, 2484, 2485, 2486, 2487, 2488, 2489, 2490, 2491, 2492, 2493, 2494, 2495, 2496, 2497, 2498, 2499, 2500, 2501, 2502, 2503, 2504, 2505, 2506, 2507, 2508, 2509, 2510, 2511, 2512, 2513, 2514, 2515, 2516, 2517, 2518, 2519, 2520, 2521, 2522, 2523, 2524, 2525, 2526, 2527, 2528, 2529, 2530, 2531, 2532, 2533, 2534, 2535, 2538, 2539, 2540, 2541, 2542, 2543, 2544, 2545, 2546, 2547, 2548, 2549, 2550, 2551, 2553, 2554, 2555, 2556, 2557, 2558, 2559, 2560, 2561, 2562, 2563, 2564, 2565, 2566, 2567, 2568, 2569, 2570, 2571, 2572, 2573, 2574, 2575, 2576, 2577, 2578, 2580, 2582, 2584, 2585, 2586, 2587, 2588, 2589, 2590, 2591, 2592, 2593, 2594, 2595, 2596, 2597, 2598, 2600, 2601, 2602, 2603, 2605, 2606, 2607, 2608, 2609, 2610, 2611, 2612, 2613, 2614, 2615, 2616, 2617, 2618, 2619, 2620, 2621, 2623, 2624, 2628, 2629, 2630, 2631, 2632, 2633, 2634, 2635, 2636, 2637, 2638, 2643, 2645, 2646, 2647, 2648, 2649, 2650, 2651, 2652, 2653, 2654, 2655, 2656, 2657, 2658, 2659, 2660, 2663, 2664, 2665, 2667, 2668, 2669, 2670, 2671, 2672, 2674, 2675, 2676, 2677, 2678, 2680, 2681, 2683, 2685, 2687, 2688, 2689, 2690, 2692, 2694, 2695, 2696, 2697, 2699, 2701, 2702, 2704, 2706, 2708, 2711, 2713, 2715, 2716, 2717, 2720, 2721, 2722, 2723, 2725, 2726, 2727, 2728, 2729, 2730, 2733, 2734, 2735, 2744, 2747, 2748, 2749, 2752, 2753, 2757, 2758, 2759, 2760, 2761, 2762, 2764, 2765, 2768, 2769, 2770, 2772, 2773, 2774, 2777, 2786, 2788, 2789, 2790, 2791, 2792, 2793, 2794, 2795, 2796, 2797, 2798, 2799, 2800, 2801, 2802, 2807, 2810, 2811, 2812, 2814, 2816, 2824, 2825, 2826, 2828, 2829, 2830, 2832, 2833, 2834, 2841, 2842, 2843, 2844, 2846, 2847, 2854, 2855, 2856, 2857, 2862, 2864, 2866, 2867, 2868, 2869, 2870, 2871, 2885, 2886, 2887, 2888, 2889, 2890, 2891, 2893, 2894, 2896, 2898, 2899, 2901, 2902, 2909, 2910, 2914, 2916, 2918, 2919, 2920, 2926, 2927, 2932, 2933, 2937, 2938, 2939, 2941, 2942, 2945, 2953, 2954, 2956, 2957, 2960, 2962, 2963, 2964, 2965, 2967, 2972, 2973, 2977, 2979, 2980, 2982, 2983, 2988, 2991, 2993, 2994, 2995, 2997, 3006, 3008, 3012, 3013, 3015, 3023, 3024, 3027, 3028, 3029, 3030, 3031, 3032, 3033, 3034, 3035, 3036, 3037, 3038, 3039, 3043, 3044, 3045, 3046, 3048, 3049, 3050, 3051, 3052, 3053, 3054, 3055, 3059, 3064, 3065, 3071, 3072, 3075, 3076, 3080, 3082, 3084, 3093, 3096, 3098, 3099, 3101, 3119, 3121, 3122, 3123, 3124, 3126, 3128, 3130, 3133, 3142, 3144, 3148, 3159, 3161, 3162, 3163, 3164, 3165, 3166, 3168, 3169, 3170, 3176, 3182, 3188, 3190, 3191, 3195, 3200, 3202, 3203, 3210, 3212, 3216, 3218, 3226, 3227, 3228, 3229, 3230, 3231, 3232, 3234, 3235, 3238, 3239, 3241, 3243, 3244, 3245, 3246, 3247, 3248, 3249, 3250, 3260, 3262, 3263, 3271, 3273, 3275, 3281, 3282, 3283, 3287, 3288, 3289, 3300, 3301, 3302, 3303, 3304, 3305, 3307, 3310, 3311, 3312, 3313, 3314, 3315, 3316, 3317, 3318, 3322, 3324, 3325, 3328, 3330, 3346, 3347, 3348, 3349, 3350, 3358, 3359, 3362, 3364, 3365, 3366, 3367, 3368, 3372, 3373, 3382, 3385, 3387, 3388, 3389, 3390, 3391, 3392, 3393, 3400, 3403, 3404, 3405, 3407, 3408, 3409, 3412, 3414, 3420, 3423, 3425, 3426, 3427, 3428, 3429, 3430, 3431, 3434, 3438, 3441, 3442, 3446, 3449, 3450, 3451, 3452, 3453, 3454, 3455, 3463, 3466, 3469, 3470, 3471, 3472, 3473, 3474, 3477, 3478, 3480, 3481, 3482, 3487, 3490, 3494, 3498, 3499, 3502, 3503, 3505, 3506, 3508, 3509, 3510, 3511, 3513, 3520, 3522, 3523, 3526, 3529, 3533, 3535, 3536, 3542, 3543, 3546, 3547, 3549, 3550, 3553, 3554, 3555, 3557, 3560, 3561, 3563, 3564, 3567, 3568, 3569, 3571, 3574, 3575, 3576, 3578, 3579, 3580, 3581, 3583, 3584, 3585, 3592, 3594, 3595, 3596, 3597, 3603, 3612, 3613, 3617, 3622, 3625, 3626, 3627, 3628, 3630, 3631, 3632, 3633, 3635, 3636, 3638, 3639, 3640, 3641, 3642, 3646, 3647, 3648, 3654, 3657, 3659, 3660, 3661, 3664, 3668, 3669, 3673, 3674, 3678, 3679, 3680, 3681, 3684, 3685, 3687, 3688, 3697, 3699, 3702, 3703, 3704, 3705, 3706, 3708, 3710, 3711, 3712, 3714, 3715, 3721, 3722, 3724, 3725, 3728, 3729, 3730, 3731, 3732, 3733, 3734, 3735, 3736, 3737, 3739, 3740, 3741, 3743, 3744, 3746, 3748, 3755, 3761, 3770, 3771, 3773, 3774, 3776, 3778, 3779, 3781, 3782, 3784, 3785, 3792, 3793, 3794, 3795, 3796, 3797, 3798, 3799, 3800, 3801, 3802, 3803, 3804, 3805, 3806, 3807, 3808, 3809, 3810, 3811, 3812, 3814, 3815, 3816, 3820, 3829, 3839, 3841, 3842, 3843, 3844, 3845, 3851, 3852, 3853, 3854, 3855, 3856, 3857, 3858, 3859, 3860, 3861, 3862, 3863, 3864, 3865, 3868, 3869, 3871, 3874, 3875, 3876, 3877, 3878, 3879, 3880, 3882, 3883, 3884, 3885, 3887, 3895, 3899, 3904, 3907, 3908, 3909, 3910, 3911, 3912, 3913, 3914, 3915, 3916, 3917, 3921, 3924, 3927, 3928, 3929, 3931, 3932, 3935, 3936, 3937, 3938, 3939, 3940, 3941, 3942, 3943, 3945, 3946, 3956, 3957, 3961, 3962, 3965, 3971, 3977, 3978, 3979, 3980, 3981, 3982, 3983, 3985, 3988, 3989, 3990, 3991, 3992, 3993, 3994, 3995, 3997, 3998, 3999, 4001, 4002, 4003, 4004, 4009, 4011, 4012, 4013, 4015, 4016, 4017, 4020, 4021, 4023, 4025, 4026, 4028, 4029, 4031, 4032, 4034, 4035, 4036, 4037, 4038, 4040, 4052, 4055, 4056, 4060, 4061, 4066, 4067, 4070, 4077, 4078, 4080, 4081, 4082, 4083, 4084, 4085, 4086, 4087, 4088, 4089, 4090, 4102, 4105, 4106, 4108, 4109, 4110, 4114, 4115, 4117, 4118, 4119, 4128, 4129, 4132, 4136, 4137, 4142, 4147, 4159, 4163, 4168, 4170, 4171, 4172, 4173, 4175, 4182, 4183, 4186, 4188, 4192, 4194, 4199, 4208, 4225, 4226, 4227, 4228, 4232, 4239, 4240, 4258, 2557, 2988, 2993, or 2585.

20. (canceled)

21. A prime editing system comprising:
a. the prime editing guide RNA (PEgRNA) of claim 1, or a nucleic acid encoding the PEgRNA; and
b. a nick guide RNA (ngRNA) comprising at its 3′ end nucleotides 5-20 of any one of SEQ ID NOs: 41, 60, 61, 62, 63, 64, 65, 66, 69, 71, 2045, 2046, 2047, 2048, 2049, 2050, 2051, 2052, 2053, 2054, 2055, 2056, 2057, 2058, 2059, 2060, 2061, 2062, 2063, 2064, 2065, 2066, 2067, 2068, 2069, 2070, 2071, 2072, 2073, 2074, 2075, 2076, 2077, 2078, 2079, 2080, 2081, 2082, 2083, 2084, 2085, 2086, 2087, 2088, 2089, 2090, 2091, 2092, 2093, 2094, 2095, 2096, 2423, 2424, 2425, 2426, 2427, 2428, 2429, 2430, 2431, 2432, 2433, 2434, 2435, 2436, 2437, 2438, 2439, 2440, 2441, 2442, 2443, or 2444 and a gRNA core capable of binding to a Cas9 protein, or a nucleic acid encoding the ngRNA.

22. (canceled)

23. The prime editing system of claim 21, wherein the spacer of the ngRNA comprises at its 3′ end nucleotides 4-20, 3-20, 2-20, or 1-20 of any one of SEQ ID NOs: 41, 60, 61, 62, 63, 64, 65, 66, 69, 71, 2045, 2046, 2047, 2048, 2049, 2050, 2051, 2052, 2053, 2054, 2055, 2056, 2057, 2058, 2059, 2060, 2061, 2062, 2063, 2064, 2065, 2066, 2067, 2068, 2069, 2070, 2071, 2072, 2073, 2074, 2075, 2076, 2077, 2078, 2079, 2080, 2081, 2082, 2083, 2084, 2085, 2086, 2087, 2088, 2089, 2090, 2091, 2092, 2093, 2094, 2095, 2096, 2423, 2424, 2425, 2426, 2427, 2428, 2429, 2430, 2431, 2432, 2433, 2434, 2435, 2436, 2437, 2438, 2439, 2440, 2441, 2442, 2443, or 2444.

24.-25. (canceled)

26. The prime editing system of claim 21, wherein the ngRNA comprises SEQ ID NOs: 2257, 2258, 2259, 2260, 2261, 2262, 2263, 2264, 2265, 2266, 2267, 2268, 2269, 2270, 2271, 2272, 2273, 2274, 2275, 2276, 2277, 2278, 2279, 2280, 2281, 2282, 2283, 2284, 2285, 2286, 2287, 2288, 2289, 4410, 4411, 4412, 4413, 4414, 4415, 4416, 4417, 4418, 4419, 4420, 4421, or 4422.

27.-95. (canceled)

The application's sequence listing, which the Patent Office published only in electronic form, follows.

SEQUENCE LISTING (5903 sequences)

SEQ ID NO: 1 - RNA, 20 nt, synthetic construct
  misc_feature 1..20: note = Description of Artificial Sequence: Synthetic oligonucleotide
  source 1..20: mol_type = other RNA
cctcaggaaggttctggctg

SEQ ID NO: 2-4 - skipped (3 entries)

SEQ ID NO: 5 - RNA, 10 nt, synthetic construct
  misc_feature 1..10: note = Description of Artificial Sequence: Synthetic oligonucleotide
  source 1..10: mol_type = other RNA
ccagaacctt

SEQ ID NO: 6 - RNA, 11 nt, synthetic construct
  misc_feature 1..11: note = Description of Artificial Sequence: Synthetic oligonucleotide
  source 1..11: mol_type = other RNA
ccagaaccttc

SEQ ID NO: 7 - RNA, 12 nt, synthetic construct
  misc_feature 1..12: note = Description of Artificial Sequence: Synthetic oligonucleotide
  source 1..12: mol_type = other RNA
ccagaaccttcc

SEQ ID NO: 8 - RNA, 13 nt, synthetic construct
  misc_feature 1..13: note = Description of Artificial Sequence: Synthetic oligonucleotide
  source 1..13: mol_type = other RNA
ccagaaccttcct

SEQ ID NO: 9 - RNA, 14 nt, synthetic construct
  misc_feature 1..14: note = Description of Artificial Sequence: Synthetic oligonucleotide
  source 1..14: mol_type = other RNA
ccagaaccttcctg

SEQ ID NO: 10 - RNA, 15 nt, synthetic construct
  misc_feature 1..15: note = Description of Artificial Sequence: Synthetic oligonucleotide
  source 1..15: mol_type = other RNA
ccagaaccttcctga

SEQ ID NO: 11 - RNA, 16 nt, synthetic construct
  misc_feature 1..16: note = Description of Artificial Sequence: Synthetic oligonucleotide
  source 1..16: mol_type = other RNA
ccagaaccttcctgag

SEQ ID NO: 12 - RNA, 17 nt, synthetic construct
  misc_feature 1..17: note = Description of Artificial Sequence: Synthetic oligonucleotide
  source 1..17: mol_type = other RNA
ccagaaccttcctgagg

SEQ ID NO: 13 - RNA, 36 nt, synthetic construct
  misc_feature 1..36: note = Description of Artificial Sequence: Synthetic oligonucleotide
  source 1..36: mol_type = other RNA
ggtgttcactgctggcctccgcagtccccaccacag

SEQ ID NO: 14 - RNA, 37 nt, synthetic construct
  misc_feature 1..37: note = Description of Artificial Sequence: Synthetic oligonucleotide
  source 1..37: mol_type = other RNA
gggtgttcactgctggcctccgcagtccccaccacag

SEQ ID NO: 15 - RNA, 38 nt, synthetic construct
  misc_feature 1..38: note = Description of Artificial Sequence: Synthetic oligonucleotide
  source 1..38: mol_type = other RNA
ggggtgttcactgctggcctccgcagtccccaccacag

SEQ ID NO: 16 - RNA, 39 nt, synthetic construct
  misc_feature 1..39: note = Description of Artificial Sequence: Synthetic oligonucleotide
  source 1..39: mol_type = other RNA
aggggtgttcactgctggcctccgcagtccccaccacag

SEQ ID NO: 17 - RNA, 40 nt, synthetic construct
  misc_feature 1..40: note = Description of Artificial Sequence: Synthetic oligonucleotide
  source 1..40: mol_type = other RNA
aaggggtgttcactgctggcctccgcagtccccaccacag

SEQ ID NO: 18 - RNA, 20 nt, synthetic construct
  misc_feature 1..20: note = Description of Artificial Sequence: Synthetic oligonucleotide
  source 1..20: mol_type = other RNA
accttcctgaggggcagtgt

SEQ ID NO: 19 - RNA, 20 nt, synthetic construct
  misc_feature 1..20: note = Description of Artificial Sequence: Synthetic oligonucleotide
  source 1..20: mol_type = other RNA
cccaaggggtgttcactgct

SEQ ID NO: 20 - RNA, 20 nt, synthetic construct
  misc_feature 1..20: note = Description of Artificial Sequence: Synthetic oligonucleotide
  source 1..20: mol_type = other RNA
ccccagcaggagcacccgca

SEQ ID NO: 21 - RNA, 20 nt, synthetic construct
  misc_feature 1..20: note = Description of Artificial Sequence: Synthetic oligonucleotide
  source 1..20: mol_type = other RNA
gagcacccgcatgaccctgg

SEQ ID NO: 22 - RNA, 20 nt, synthetic construct
  misc_feature 1..20: note = Description of Artificial Sequence: Synthetic oligonucleotide
  source 1..20: mol_type = other RNA
tggccacatcccccagcagg

SEQ ID NO: 23 - RNA, 20 nt, synthetic construct
  misc_feature 1..20: note = Description of Artificial Sequence: Synthetic oligonucleotide
  source 1..20: mol_type = other RNA
gcagtgtggccacatccccc

SEQ ID NO: 24 - RNA, 20 nt, synthetic construct
  misc_feature 1..20: note = Description of Artificial Sequence: Synthetic oligonucleotide
  source 1..20: mol_type = other RNA
agcattggcggggagggcag

SEQ ID NO: 25 - RNA, 20 nt, synthetic construct
  misc_feature 1..20: note = Description of Artificial Sequence: Synthetic oligonucleotide
  source 1..20: mol_type = other RNA
agaaccttcctgaggggcag

SEQ ID NO: 26 - RNA, 20 nt, synthetic construct
  misc_feature 1..20: note = Description of Artificial Sequence: Synthetic oligonucleotide
  source 1..20: mol_type = other RNA
catcccccagcaggagcacc

SEQ ID NO: 27 - RNA, 20 nt, synthetic construct
  misc_feature 1..20: note = Description of Artificial Sequence: Synthetic oligonucleotide
  source 1..20: mol_type = other RNA
aggagcacccgcatgaccct

SEQ ID NO: 28 - RNA, 20 nt, synthetic construct
  misc_feature 1..20: note = Description of Artificial Sequence: Synthetic oligonucleotide
  source 1..20: mol_type = other RNA
cagccagaaccttcctgagg

SEQ ID NO: 29 - RNA, 20 nt, synthetic construct
  misc_feature 1..20: note = Description of Artificial Sequence: Synthetic oligonucleotide
  source 1..20: mol_type = other RNA
ccagaaccttcctgaggggc

SEQ ID NO: 30 - RNA, 20 nt, synthetic construct
  misc_feature 1..20: note = Description of Artificial Sequence: Synthetic oligonucleotide
  source 1..20: mol_type = other RNA
caggagcacccgcatgaccc

SEQ ID NO: 31 - RNA, 20 nt, synthetic construct
  misc_feature 1..20: note = Description of Artificial Sequence: Synthetic oligonucleotide
  source 1..20: mol_type = other RNA
gtgtggccacatcccccagc

SEQ ID NO: 32 - RNA, 20 nt, synthetic construct
  misc_feature 1..20: note = Description of Artificial Sequence: Synthetic oligonucleotide
  source 1..20: mol_type = other RNA
aaccttcctgaggggcagtg

SEQ ID NO: 33 - RNA, 20 nt, synthetic construct
  misc_feature 1..20: note = Description of Artificial Sequence: Synthetic oligonucleotide
  source 1..20: mol_type = other RNA
tttggtgactgccacgccca

SEQ ID NO: 34 - RNA, 20 nt, synthetic construct
  misc_feature 1..20: note = Description of Artificial Sequence: Synthetic oligonucleotide
  source 1..20: mol_type = other RNA
catgaccctggggacgccat

SEQ ID NO: 35 - RNA, 20 nt, synthetic construct
  misc_feature 1..20: note = Description of Artificial Sequence: Synthetic oligonucleotide
  source 1..20: mol_type = other RNA
agagcattggcggggagggc

SEQ ID NO: 36 - RNA, 20 nt, synthetic construct
  misc_feature 1..20: note = Description of Artificial Sequence: Synthetic oligonucleotide
  source 1..20: mol_type = other RNA
ggagcacccgcatgaccctg

SEQ ID NO: 37 - RNA, 20 nt, synthetic construct
  misc_feature 1..20: note = Description of Artificial Sequence: Synthetic oligonucleotide
  source 1..20: mol_type = other RNA
cacgcccaaggggtgttcac

SEQ ID NO: 38 - RNA, 20 nt, synthetic construct
  misc_feature 1..20: note = Description of Artificial Sequence: Synthetic oligonucleotide
  source 1..20: mol_type = other RNA
gcctccgcagtccccaccac

SEQ ID NO: 39 - RNA, 20 nt, synthetic construct
  misc_feature 1..20: note = Description of Artificial Sequence: Synthetic oligonucleotide
  source 1..20: mol_type = other RNA
caccacagccagaaccttcc

SEQ ID NO: 40 - RNA, 20 nt, synthetic construct
  misc_feature 1..20: note = Description of Artificial Sequence: Synthetic oligonucleotide
  source 1..20: mol_type = other RNA
tgtggccacatcccccagca

SEQ ID NO: 41 - RNA, 20 nt, synthetic construct
  misc_feature 1..20: note = Description of Artificial Sequence: Synthetic oligonucleotide
  source 1..20: mol_type = other RNA
cagtgagttgtggttgtttt

SEQ ID NO: 42 - RNA, 20 nt, synthetic construct
  misc_feature 1..20: note = Description of Artificial Sequence: Synthetic oligonucleotide
  source 1..20: mol_type = other RNA
ccgcagtccccaccacagcc

SEQ ID NO: 43 - RNA, 20 nt, synthetic construct
  misc_feature 1..20: note = Description of Artificial Sequence: Synthetic oligonucleotide
  source 1..20: mol_type = other RNA
tacctctttacagtatttgg

SEQ ID NO: 44 - RNA, 20 nt, synthetic construct
  misc_feature 1..20: note = Description of Artificial Sequence: Synthetic oligonucleotide
  source 1..20: mol_type = other RNA
gggtgttcactgctggcctc

SEQ ID NO: 45 - RNA, 20 nt, synthetic construct
  misc_feature 1..20: note = Description of Artificial Sequence: Synthetic oligonucleotide
  source 1..20: mol_type = other RNA
acgtacctctttacagtatt

SEQ ID NO: 46 - RNA, 20 nt, synthetic construct
  misc_feature 1..20: note = Description of Artificial Sequence: Synthetic oligonucleotide
  source 1..20: mol_type = other RNA
tgactgccacgcccaagggg

SEQ ID NO: 47 - RNA, 20 nt, synthetic construct
  misc_feature 1..20: note = Description of Artificial Sequence: Synthetic oligonucleotide
  source 1..20: mol_type = other RNA
acagccagaaccttcctgag

SEQ ID NO: 48 - RNA, 20 nt, synthetic construct
  misc_feature 1..20: note = Description of Artificial Sequence: Synthetic oligonucleotide
  source 1..20: mol_type = other RNA
gcccaaggggtgttcactgc

SEQ ID NO: 49 - RNA, 20 nt, synthetic construct
  misc_feature 1..20: note = Description of Artificial Sequence: Synthetic oligonucleotide
  source 1..20: mol_type = other RNA
cgtacctctttacagtattt

SEQ ID NO: 50 - RNA, 20 nt, synthetic construct
  misc_feature 1..20: note = Description of Artificial Sequence: Synthetic oligonucleotide
  source 1..20: mol_type = other RNA
gcatgaccctggggacgcca

SEQ ID NO: 51 - RNA, 20 nt, synthetic construct
  misc_feature 1..20: note = Description of Artificial Sequence: Synthetic oligonucleotide
  source 1..20: mol_type = other RNA
ggagggcagggccacgccca

SEQ ID NO: 52 - RNA, 20 nt, synthetic construct
  misc_feature 1..20: note = Description of Artificial Sequence: Synthetic oligonucleotide
  source 1..20: mol_type = other RNA
tggcggggagggcagggcca

SEQ ID NO: 53 - RNA, 20 nt, synthetic construct
  misc_feature 1..20: note = Description of Artificial Sequence: Synthetic oligonucleotide
  source 1..20: mol_type = other RNA
tggtgactgccacgcccaag

SEQ ID NO: 54 - RNA, 20 nt, synthetic construct
  misc_feature 1..20: note = Description of Artificial Sequence: Synthetic oligonucleotide
  source 1..20: mol_type = other RNA
acagtatttggtgactgcca

SEQ ID NO: 55 - RNA, 20 nt, synthetic construct
  misc_feature 1..20: note = Description of Artificial Sequence: Synthetic oligonucleotide
  source 1..20: mol_type = other RNA
gagcattggcggggagggca

SEQ ID NO: 56 - RNA, 20 nt, synthetic construct
  misc_feature 1..20: note = Description of Artificial Sequence: Synthetic oligonucleotide
  source 1..20: mol_type = other RNA
cagggccacgcccaagtcca

SEQ ID NO: 57 - RNA, 20 nt, synthetic construct
  misc_feature 1..20: note = Description of Artificial Sequence: Synthetic oligonucleotide
  source 1..20: mol_type = other RNA
aagtccacgtacctctttac

SEQ ID NO: 58 - RNA, 20 nt, synthetic construct
  misc_feature 1..20: note = Description of Artificial Sequence: Synthetic oligonucleotide
  source 1..20: mol_type = other RNA
ttggtgactgccacgcccaa

SEQ ID NO: 59 - RNA, 20 nt, synthetic construct
  misc_feature 1..20: note = Description of Artificial Sequence: Synthetic oligonucleotide
  source 1..20: mol_type = other RNA
tctttacagtatttggtgac

SEQ ID NO: 60 - RNA, 20 nt, synthetic construct
  misc_feature 1..20: note = Description of Artificial Sequence: Synthetic oligonucleotide
  source 1..20: mol_type = other RNA
tgaccacaatacagatggag

SEQ ID NO: 61 - RNA, 20 nt, synthetic construct
  misc_feature 1..20: note = Description of Artificial Sequence: Synthetic oligonucleotide
  source 1..20: mol_type = other RNA
actgaccacaatacagatgg

SEQ ID NO: 62 - RNA, 20 nt, synthetic construct
  misc_feature 1..20: note = Description of Artificial Sequence: Synthetic oligonucleotide
  source 1..20: mol_type = other RNA
aagactggcaccattaccca

SEQ ID NO: 63 - RNA, 20 nt, synthetic construct
  misc_feature 1..20: note = Description of Artificial Sequence: Synthetic oligonucleotide
  source 1..20: mol_type = other RNA
gtattgtggtcagtgagttg

SEQ ID NO: 64 - RNA, 20 nt, synthetic construct
  misc_feature 1..20: note = Description of Artificial Sequence: Synthetic oligonucleotide
  source 1..20: mol_type = other RNA
aagcccctccatctgtattg

SEQ ID NO: 65 - RNA, 20 nt, synthetic construct
  misc_feature 1..20: note = Description of Artificial Sequence: Synthetic oligonucleotide
  source 1..20: mol_type = other RNA
actgtgatgtttgacaagac

SEQ ID NO: 66 - RNA, 20 nt, synthetic construct
  misc_feature 1..20: note = Description of Artificial Sequence: Synthetic oligonucleotide
  source 1..20: mol_type = other RNA
ctcactgaccacaatacaga

SEQ ID NO: 67 - RNA, 20 nt, synthetic construct
  misc_feature 1..20: note = Description of Artificial Sequence: Synthetic oligonucleotide
  source 1..20: mol_type = other RNA
tgttcactgctggcctccgc

SEQ ID NO: 68 - RNA, 20 nt, synthetic construct
  misc_feature 1..20: note = Description of Artificial Sequence: Synthetic oligonucleotide
  source 1..20: mol_type = other RNA
cacagccagaaccttcctga

SEQ ID NO: 69 - RNA, 20 nt, synthetic construct
  misc_feature 1..20: note = Description of Artificial Sequence: Synthetic oligonucleotide
  source 1..20: mol_type = other RNA
ccattacccatggcgtcccc

SEQ ID NO: 70 - RNA, 20 nt, synthetic construct
  misc_feature 1..20: note = Description of Artificial Sequence: Synthetic oligonucleotide
  source 1..20: mol_type = other RNA
ccacagccagaaccttcctg

SEQ ID NO: 71 - RNA, 20 nt, synthetic construct
  misc_feature 1..20: note = Description of Artificial Sequence: Synthetic oligonucleotide
  source 1..20: mol_type = other RNA
ctgaccacaatacagatgga

SEQ ID NO: 72 - RNA, 20 nt, synthetic construct
  misc_feature 1..20: note = Description of Artificial Sequence: Synthetic oligonucleotide
  source 1..20: mol_type = other RNA
cctggggacgccatgggtaa

SEQ ID NO: 73 - RNA, 139 nt, synthetic construct
  misc_feature 1..139: note = Description of Artificial Sequence: Synthetic polynucleotide
  source 1..139: mol_type = other RNA
cctcaggaaggttctggctggttttagagctagaaatagcaagttaaaataaggctagtccgttatcaacttgaaaaagtggcaccgagtcggtgcggtgttcactgctggcctccgcagtccccaccacagccagaac

SEQ ID NO: 74 - RNA, 140 nt, synthetic construct
  misc_feature 1..140: note = Description of Artificial Sequence: Synthetic polynucleotide
  source 1..140: mol_type = other RNA
cctcaggaaggttctggctggttttagagctagaaatagcaagttaaaataaggctagtccgttatcaacttgaaaaagtggcaccgagtcggtgcggtgttcactgctggcctccgcagtccccaccacagccagaacc

SEQ ID NO: 75 - RNA, 140 nt, synthetic construct
  misc_feature 1..140: note = Description of Artificial Sequence: Synthetic polynucleotide
  source 1..140: mol_type = other RNA
cctcaggaaggttctggctggttttagagctagaaatagcaagttaaaataaggctagtccgttatcaacttgaaaaagtggcaccgagtcggtgcgggtgttcactgctggcctccgcagtccccaccacagccagaac

SEQ ID NO: 76 - RNA, 141 nt, synthetic construct
  misc_feature 1..141: note = Description of Artificial Sequence: Synthetic polynucleotide
  source 1..141: mol_type = other RNA
cctcaggaaggttctggctggttttagagctagaaatagcaagttaaaataaggctagtccgttatcaacttgaaaaagtggcaccgagtcggtgcgggtgttcactgctggcctccgcagtccccaccacagccagaacc

SEQ ID NO: 77 - RNA, 141 nt, synthetic construct
  misc_feature 1..141: note = Description of Artificial Sequence: Synthetic polynucleotide
  source 1..141: mol_type = other RNA
cctcaggaaggttctggctggttttagagctagaaatagcaagttaaaataaggctagtccgttatcaacttgaaaaagtggcaccgagtcggtgcggggtgttcactgctggcctccgcagtccccaccacagccagaac

SEQ ID NO: 78 - RNA, 141 nt, synthetic construct
  misc_feature 1..141: note = Description of Artificial Sequence: Synthetic polynucleotide
  source 1..141: mol_type = other RNA
cctcaggaaggttctggctggttttagagctagaaatagcaagttaaaataaggctagtccgttatcaacttgaaaaagtggcaccgagtcggtgcggtgttcactgctggcctccgcagtccccaccacagccagaacct

SEQ ID NO: 79 - RNA, 142 nt, synthetic construct
  misc_feature 1..142: note = Description of Artificial Sequence: Synthetic polynucleotide
  source 1..142: mol_type = other RNA
cctcaggaaggttctggctggttttagagctagaaatagcaagttaaaataaggctagtccgttatcaacttgaaaaagtggcaccgagtcggtgcggggtgttcactgctggcctccgcagtccccaccacagccagaacc

SEQ ID NO: 80 - RNA, 142 nt, synthetic construct
  misc_feature 1..142: note = Description of Artificial Sequence: Synthetic polynucleotide
  source 1..142: mol_type = other RNA
cctcaggaaggttctggctggttttagagctagaaatagcaagttaaaataaggctagtccgttatcaacttgaaaaagtggcaccgagtcggtgcgggtgttcactgctggcctccgcagtccccaccacagccagaacct

SEQ ID NO: 81 - RNA, 142 nt, synthetic construct
  misc_feature 1..142: note = Description of Artificial Sequence: Synthetic polynucleotide
  source 1..142: mol_type = other RNA
cctcaggaaggttctggctggttttagagctagaaatagcaagttaaaataaggctagtccgttatcaacttgaaaaagtggcaccgagtcggtgcaggggtgttcactgctggcctccgcagtccccaccacagccagaac

SEQ ID NO: 82 - RNA, 142 nt, synthetic construct
  misc_feature 1..142: note = Description of Artificial Sequence: Synthetic polynucleotide
  source 1..142: mol_type = other RNA
cctcaggaaggttctggctggttttagagctagaaatagcaagttaaaataaggctagtccgttatcaacttgaaaaagtggcaccgagtcggtgcggtgttcactgctggcctccgcagtccccaccacagccagaacctt

SEQ ID NO: 83 - RNA, 143 nt, synthetic construct
  misc_feature 1..143: note = Description of Artificial Sequence: Synthetic polynucleotide
  source 1..143: mol_type = other RNA
cctcaggaaggttctggctggttttagagctagaaatagcaagttaaaataaggctagtccgttatcaacttgaaaaagtggcaccgagtcggtgcaaggggtgttcactgctggcctccgcagtccccaccacagccagaac

SEQ ID NO: 84 - RNA, 143 nt, synthetic construct
  misc_feature 1..143: note = Description of Artificial Sequence: Synthetic polynucleotide
  source 1..143: mol_type = other RNA
cctcaggaaggttctggctggttttagagctagaaatagcaagttaaaataaggctagtccgttatcaacttgaaaaagtggcaccgagtcggtgcgggtgttcactgctggcctccgcagtccccaccacagccagaacctt

SEQ ID NO: 85 - RNA, 143 nt, synthetic construct
  misc_feature 1..143: note = Description of Artificial Sequence: Synthetic polynucleotide
  source 1..143: mol_type = other RNA
cctcaggaaggttctggctggttttagagctagaaatagcaagttaaaataaggctagtccgttatcaacttgaaaaagtggcaccgagtcggtgcggggtgttcactgctggcctccgcagtccccaccacagccagaacct

SEQ ID NO: 86 - RNA, 143 nt, synthetic construct
  misc_feature 1..143: note = Description of Artificial Sequence: Synthetic polynucleotide
  source 1..143: mol_type = other RNA
cctcaggaaggttctggctggttttagagctagaaatagcaagttaaaataaggctagtccgttatcaacttgaaaaagtggcaccgagtcggtgcaggggtgttcactgctggcctccgcagtccccaccacagccagaacc

SEQ ID NO: 87 - RNA, 143 nt, synthetic construct
  misc_feature 1..143: note = Description of Artificial Sequence: Synthetic polynucleotide
  source 1..143: mol_type = other RNA
cctcaggaaggttctggctggttttagagctagaaatagcaagttaaaataaggctagtccgttatcaacttgaaaaagtggcaccgagtcggtgcggtgttcactgctggcctccgcagtccccaccacagccagaaccttc

SEQ ID NO: 88 - RNA, 144 nt, synthetic construct
  misc_feature 1..144: note = Description of Artificial Sequence: Synthetic polynucleotide
  source 1..144: mol_type = other RNA
cctcaggaaggttctggctggttttagagctagaaatagcaagttaaaataaggctagtccgttatcaacttgaaaaagtggcaccgagtcggtgcaaggggtgttcactgctggcctccgcagtccccaccacagccagaacc

SEQ ID NO: 89 - RNA, 144 nt, synthetic construct
  misc_feature 1..144: note = Description of Artificial Sequence: Synthetic polynucleotide
  source 1..144: mol_type = other RNA
cctcaggaaggttctggctggttttagagctagaaatagcaagttaaaataaggctagtccgttatcaacttgaaaaagtggcaccgagtcggtgcggtgttcactgctggcctccgcagtccccaccacagccagaaccttcc

SEQ ID NO: 90 - RNA, 144 nt, synthetic construct
  misc_feature 1..144: note = Description of Artificial Sequence: Synthetic polynucleotide
  source 1..144: mol_type = other RNA
cctcaggaaggttctggctggttttagagctagaaatagcaagttaaaataaggctagtccgttatcaacttgaaaaagtggcaccgagtcggtgcggggtgttcactgctggcctccgcagtccccaccacagccagaacctt

SEQ ID NO: 91 - RNA, 144 nt, synthetic construct
  misc_feature 1..144: note = Description of Artificial Sequence: Synthetic polynucleotide
  source 1..144: mol_type = other RNA
cctcaggaaggttctggctggttttagagctagaaatagcaagttaaaataaggctagtccgttatcaacttgaaaaagtggcaccgagtcggtgcaggggtgttcactgctggcctccgcagtccccaccacagccagaacct

SEQ ID NO: 92 - RNA, 144 nt, synthetic construct
  misc_feature 1..144: note = Description of Artificial Sequence: Synthetic polynucleotide
  source 1..144: mol_type = other RNA
cctcaggaaggttctggctggttttagagctagaaatagcaagttaaaataaggctagtccgttatcaacttgaaaaagtggcaccgagtcggtgcgggtgttcactgctggcctccgcagtccccaccacagccagaaccttc

SEQ ID NO: 93 - RNA, 145 nt, synthetic construct
  misc_feature 1..145: note = Description of Artificial Sequence: Synthetic polynucleotide
  source 1..145: mol_type = other RNA
cctcaggaaggttctggctggttttagagctagaaatagcaagttaaaataaggctagtccgttatcaacttgaaaaagtggcaccgagtcggtgcggggtgttcactgctggcctccgcagtccccaccacagccagaaccttc

SEQ ID NO: 94 - RNA, 145 nt, synthetic construct
  misc_feature 1..145: note = Description of Artificial Sequence: Synthetic polynucleotide
  source 1..145: mol_type = other RNA
cctcaggaaggttctggctggttttagagctagaaatagcaagttaaaataaggctagtccgttatcaacttgaaaaagtggcaccgagtcggtgcggtgttcactgctggcctccgcagtccccaccacagccagaaccttcct

SEQ ID NO: 95 - RNA, 145 nt, synthetic construct
  misc_feature 1..145: note = Description of Artificial Sequence: Synthetic polynucleotide
  source 1..145: mol_type = other RNA
cctcaggaaggttctggctggttttagagctagaaatagcaagttaaaataaggctagtccgttatcaacttgaaaaagtggcaccgagtcggtgcaggggtgttcactgctggcctccgcagtccccaccacagccagaacctt

SEQ ID NO: 96 - RNA, 145 nt, synthetic construct
  misc_feature 1..145: note = Description of Artificial Sequence: Synthetic polynucleotide
  source 1..145: mol_type = other RNA
cctcaggaaggttctggctggttttagagctagaaatagcaagttaaaataaggctagtccgttatcaacttgaaaaagtggcaccgagtcggtgcaaggggtgttcactgctggcctccgcagtccccaccacagccagaacct

SEQ ID NO: 97 - RNA, 145 nt, synthetic construct
  misc_feature 1..145: note = Description of Artificial Sequence: Synthetic polynucleotide
  source 1..145: mol_type = other RNA
cctcaggaaggttctggctggttttagagctagaaatagcaagttaaaataaggctagtccgttatcaacttgaaaaagtggcaccgagtcggtgcgggtgttcactgctggcctccgcagtccccaccacagccagaaccttcc

SEQ ID NO: 98 - RNA, 146 nt, synthetic construct
  misc_feature 1..146: note = Description of Artificial Sequence: Synthetic polynucleotide
  source 1..146: mol_type = other RNA
cctcaggaaggttctggctggttttagagctagaaatagcaagttaaaataaggctagtccgttatcaacttgaaaaagtggcaccgagtcggtgcggtgttcactgctggcctccgcagtccccaccacagccagaaccttcctg

SEQ ID NO: 99 - RNA, 146 nt, synthetic construct
  misc_feature 1..146: note = Description of Artificial Sequence: Synthetic polynucleotide
  source 1..146: mol_type = other RNA
cctcaggaaggttctggctggttttagagctagaaatagcaagttaaaataaggctagtccgttatcaacttgaaaaagtggcaccgagtcggtgcgggtgttcactgctggcctccgcagtccccaccacagccagaaccttcct

SEQ ID NO: 100 - RNA, 146 nt, synthetic construct
  misc_feature 1..146: note = Description of Artificial Sequence: Synthetic polynucleotide
  source 1..146: mol_type = other RNA
cctcaggaaggttctggctggttttagagctagaaatagcaagttaaaataaggctagtccgttatcaacttgaaaaagtggcaccgagtcggtgcaaggggtgttcactgctggcctccgcagtccccaccacagccagaacctt

SEQ ID NO: 101 - RNA, 146 nt, synthetic construct
  misc_feature 1..146: note = Description of Artificial Sequence: Synthetic polynucleotide
  source 1..146: mol_type = other RNA
cctcaggaaggttctggctggttttagagctagaaatagcaagttaaaataaggctagtccgttatcaacttgaaaaagtggcaccgagtcggtgcggggtgttcactgctggcctccgcagtccccaccacagccagaaccttcc

SEQ ID NO: 102 - RNA, 146 nt, synthetic construct
  misc_feature 1..146: note = Description of Artificial Sequence: Synthetic polynucleotide
  source 1..146: mol_type = other RNA
cctcaggaaggttctggctggttttagagctagaaatagcaagttaaaataaggctagtccgttatcaacttgaaaaagtggcaccgagtcggtgcaggggtgttcactgctggcctccgcagtccccaccacagccagaaccttc

SEQ ID NO: 103 - RNA, 147 nt, synthetic construct
  misc_feature 1..147: note = Description of Artificial Sequence: Synthetic polynucleotide
  source 1..147: mol_type = other RNA
cctcaggaaggttctggctggttttagagctagaaatagcaagttaaaataaggctagtccgttatcaacttgaaaaagtggcaccgagtcggtgcggggtgttcactgctggcctccgcagtccccaccacagccagaaccttcct

SEQ ID NO: 104 - RNA, 147 nt, synthetic construct
  misc_feature 1..147: note = Description of Artificial Sequence: Synthetic polynucleotide
  source 1..147: mol_type = other RNA
cctcaggaaggttctggctggttttagagctagaaatagcaagttaaaataaggctagtccgttatcaacttgaaaaagtggcaccgagtcggtgcaaggggtgttcactgctggcctccgcagtccccaccacagccagaaccttc

SEQ ID NO: 105 - RNA, 147 nt, synthetic construct
  misc_feature 1..147: note = Description of Artificial Sequence: Synthetic polynucleotide
  source 1..147: mol_type = other RNA
gcctcaggaaggttctggctggttttagagctagaaatagcaagttaaaataaggctagtccgttatcaacttgaaaaagtggcaccgagtcggtgcggtgttcactgctggcctccgcagtccccaccacagccagaacttttttt

SEQ ID NO: 106 - RNA, 147 nt, synthetic construct
  misc_feature 1..147: note = Description of Artificial Sequence: Synthetic polynucleotide
  source 1..147: mol_type = other RNA
cctcaggaaggttctggctggttttagagctagaaatagcaagttaaaataaggctagtccgttatcaacttgaaaaagtggcaccgagtcggtgcgggtgttcactgctggcctccgcagtccccaccacagccagaaccttcctg

SEQ ID NO: 107 - RNA, 147 nt, synthetic construct
  misc_feature 1..147: note = Description of Artificial Sequence: Synthetic polynucleotide
  source 1..147: mol_type = other RNA
cctcaggaaggttctggctggttttagagctagaaatagcaagttaaaataaggctagtccgttatcaacttgaaaaagtggcaccgagtcggtgcaggggtgttcactgctggcctccgcagtccccaccacagccagaaccttcc

SEQ ID NO: 108 - RNA, 148 nt, synthetic construct
  misc_feature 1..148: note = Description of Artificial Sequence: Synthetic polynucleotide
  source 1..148: mol_type = other RNA
cctcaggaaggttctggctggttttagagctagaaatagcaagttaaaataaggctagtccgttatcaacttgaaaaagtggcaccgagtcggtgcggggtgttcactgctggcctccgcagtccccaccacagccagaaccttcctg

SEQ ID NO: 109 - RNA, 148 nt, synthetic construct
  misc_feature 1..148: note = Description of Artificial Sequence: Synthetic polynucleotide
  source 1..148: mol_type = other RNA
cctcaggaaggttctggctggttttagagctagaaatagcaagttaaaataaggctagtccgttatcaacttgaaaaagtggcaccgagtcggtgcaggggtgttcactgctggcctccgcagtccccaccacagccagaaccttcct

SEQ ID NO: 110 - RNA, 148 nt, synthetic construct
  misc_feature 1..148: note = Description of Artificial Sequence: Synthetic polynucleotide
  source 1..148: mol_type = other RNA
gcctcaggaaggttctggctggttttagagctagaaatagcaagttaaaataaggctagtccgttatcaacttgaaaaagtggcaccgagtcggtgcggtgttcactgctggcctccgcagtccccaccacagccagaaccttttttt

SEQ ID NO: 111 - RNA, 148 nt, synthetic construct
  misc_feature 1..148: note = Description of Artificial Sequence: Synthetic polynucleotide
  source 1..148: mol_type = other RNA
cctcaggaaggttctggctggttttagagctagaaatagcaagttaaaataaggctagtccgttatcaacttgaaaaagtggcaccgagtcggtgcaaggggtgttcactgctggcctccgcagtccccaccacagccagaaccttcc

SEQ ID NO: 112 - RNA, 148 nt, synthetic construct
  misc_feature 1..148: note = Description of Artificial Sequence: Synthetic polynucleotide
  source 1..148: mol_type = other RNA
gcctcaggaaggttctggctggttttagagctagaaatagcaagttaaaataaggctagtccgttatcaacttgaaaaagtggcaccgagtcggtgcgggtgttcactgctggcctccgcagtccccaccacagccagaacttttttt

SEQ ID NO: 113 - RNA, 149 nt, synthetic construct
  misc_feature 1..149: note = Description of Artificial Sequence: Synthetic polynucleotide
  source 1..149: mol_type = other RNA
gcctcaggaaggttctggctggttttagagctagaaatagcaagttaaaataaggctagtccgttatcaacttgaaaaagtggcaccgagtcggtgcggggtgttcactgctggcctccgcagtccccaccacagccagaacttttttt

SEQ ID NO: 114 - RNA, 149 nt, synthetic construct
  misc_feature 1..149: note = Description of Artificial Sequence: Synthetic polynucleotide
  source 1..149: mol_type = other RNA
gcctcaggaaggttctggctggttttagagctagaaatagcaagttaaaataaggctagtccgttatcaacttgaaaaagtggcaccgagtcggtgcgggtgttcactgctggcctccgcagtccccaccacagccagaaccttttttt

SEQ ID NO: 115 - RNA, 149 nt, synthetic construct
  misc_feature 1..149: note = Description of Artificial Sequence: Synthetic polynucleotide
  source 1..149: mol_type = other RNA
gcctcaggaaggttctggctggttttagagctagaaatagcaagttaaaataaggctagtccgttatcaacttgaaaaagtggcaccgagtcggtgcggtgttcactgctggcctccgcagtccccaccacagccagaacctttttttt

SEQ ID NO: 116 - RNA, 149 nt, synthetic construct
  misc_feature 1..149: note = Description of Artificial Sequence: Synthetic polynucleotide
  source 1..149: mol_type = other RNA
cctcaggaaggttctggctggttttagagctagaaatagcaagttaaaataaggctagtccgttatcaacttgaaaaagtggcaccgagtcggtgcaaggggtgttcactgctggcctccgcagtccccaccacagccagaaccttcct

SEQ ID NO: 117 - RNA, 149 nt, synthetic construct
  misc_feature 1..149: note = Description of Artificial Sequence: Synthetic polynucleotide
  source 1..149: mol_type = other RNA
cctcaggaaggttctggctggttttagagctagaaatagcaagttaaaataaggctagtccgttatcaacttgaaaaagtggcaccgagtcggtgcaggggtgttcactgctggcctccgcagtccccaccacagccagaaccttcctg

SEQ ID NO: 118 - RNA, 150 nt, synthetic construct
  misc_feature 1..150: note = Description of Artificial Sequence: Synthetic polynucleotide
  source 1..150: mol_type = other RNA
gcctcaggaaggttctggctggttttagagctagaaatagcaagttaaaataaggctagtccgttatcaacttgaaaaagtggcaccgagtcggtgcggtgttcactgctggcctccgcagtccccaccacagccagaaccttttttttt

SEQ ID NO: 119 - RNA, 150 nt, synthetic construct
  misc_feature 1..150: note = Description of Artificial Sequence: Synthetic polynucleotide
  source 1..150: mol_type = other RNA
gcctcaggaaggttctggctggttttagagctagaaatagcaagttaaaataaggctagtccgttatcaacttgaaaaagtggcaccgagtcggtgcggggtgttcactgctggcctccgcagtccccaccacagccagaaccttttttt

SEQ ID NO: 120 - RNA, 150 nt, synthetic construct
  misc_feature 1..150: note = Description of Artificial Sequence: Synthetic polynucleotide
  source 1..150: mol_type = other RNA
cctcaggaaggttctggctggttttagagctagaaatagcaagttaaaataaggctagtccgttatcaacttgaaaaagtggcaccgagtcggtgcaaggggtgttcactgctggcctccgcagtccccaccacagccagaaccttcctg

SEQ ID NO: 121 - RNA, 150 nt, synthetic construct
  misc_feature 1..150: note = Description of Artificial Sequence: Synthetic polynucleotide
  source 1..150: mol_type = other RNA
gcctcaggaaggttctggctggttttagagctagaaatagcaagttaaaataaggctagtccgttatcaacttgaaaaagtggcaccgagtcggtgcaggggtgttcactgctggcctccgcagtccccaccacagccagaacttttttt

SEQ ID NO: 122 - RNA, 150 nt, synthetic construct
  misc_feature 1..150: note = Description of Artificial Sequence: Synthetic polynucleotide
  source 1..150: mol_type = other RNA
gcctcaggaaggttctggctggttttagagctagaaatagcaagttaaaataaggctagtccgttatcaacttgaaaaagtggcaccgagtcggtgcgggtgttcactgctggcctccgcagtccccaccacagccagaacctttttttt

SEQ ID NO: 123 - RNA, 151 nt, synthetic construct
  misc_feature 1..151: note = Description of Artificial Sequence: Synthetic polynucleotide
  source 1..151: mol_type = other RNA
gcctcaggaaggttctggctggttttagagctagaaatagcaagttaaaataaggctagtccgttatcaacttgaaaaagtggcaccgagtcggtgcggtgttcactgctggcctccgcagtccccaccacagccagaaccttcttttttt

SEQ ID NO: 124 - RNA, 151 nt, synthetic construct
  misc_feature 1..151: note = Description of Artificial Sequence: Synthetic polynucleotide
  source 1..151: mol_type = other RNA
gcctcaggaaggttctggctggttttagagctagaaatagcaagttaaaataaggctagtccgttatcaacttgaaaaagtggcaccgagtcggtgcggggtgttcactgctggcctccgcagtccccaccacagccagaacctttttttt

SEQ ID NO: 125 - RNA, 151 nt, synthetic construct
  misc_feature 1..151: note = Description of Artificial Sequence: Synthetic polynucleotide
  source 1..151: mol_type = other RNA
gcctcaggaaggttctggctggttttagagctagaaatagcaagttaaaataaggctagtccgttatcaacttgaaaaagtggcaccgagtcggtgcaggggtgttcactgctggcctccgcagtccccaccacagccagaaccttttttt

SEQ ID NO: 126 - RNA, 151 nt, synthetic construct
  misc_feature 1..151: note = Description of Artificial Sequence: Synthetic polynucleotide
  source 1..151: mol_type = other RNA
gcctcaggaaggttctggctggttttagagctagaaatagcaagttaaaataaggctagtccgttatcaacttgaaaaagtggcaccgagtcggtgcgggtgttcactgctggcctccgcagtccccaccacagccagaaccttttttttt

SEQ ID NO: 127 - RNA, 151 nt, synthetic construct
  misc_feature 1..151: note = Description of Artificial Sequence: Synthetic polynucleotide
  source 1..151: mol_type = other RNA
gcctcaggaaggttctggctggttttagagctagaaatagcaagttaaaataaggctagtccgttatcaacttgaaaaagtggcaccgagtcggtgcaaggggtgttcactgctggcctccgcagtccccaccacagccagaacttttttt

SEQ ID NO: 128 - RNA, 152 nt, synthetic construct
  misc_feature 1..152: note = Description of Artificial Sequence: Synthetic polynucleotide
  source 1..152: mol_type = other RNA
gcctcaggaaggttctggctggttttagagctagaaatagcaagttaaaataaggctagtccgttatcaacttgaaaaagtggcaccgagtcggtgcggggtgttcactgctggcctccgcagtccccaccacagccagaaccttttttttt

SEQ ID NO: 129 - RNA, 152 nt, synthetic construct
  misc_feature 1..152: note = Description of Artificial Sequence: Synthetic polynucleotide
  source 1..152: mol_type = other RNA
gcctcaggaaggttctggctggttttagagctagaaatagcaagttaaaataaggctagtccgttatcaacttgaaaaagtggcaccgagtcggtgcggtgttcactgctggcctccgcagtccccaccacagccagaaccttccttttttt

SEQ ID NO: 130 - RNA, 152 nt, synthetic construct
  misc_feature 1..152: note = Description of Artificial Sequence: Synthetic polynucleotide
  source 1..152: mol_type = other RNA
gcctcaggaaggttctggctggttttagagctagaaatagcaagttaaaataaggctagtccgttatcaacttgaaaaagtggcaccgagtcggtgcgggtgttcactgctggcctccgcagtccccaccacagccagaaccttcttttttt

SEQ ID NO: 131 - RNA, 152 nt, synthetic construct
  misc_feature 1..152: note = Description of Artificial Sequence: Synthetic polynucleotide
  source 1..152: mol_type = other RNA
gcctcaggaaggttctggctggttttagagctagaaatagcaagttaaaataaggctagtccgttatcaacttgaaaaagtggcaccgagtcggtgcaggggtgttcactgctggcctccgcagtccccaccacagccagaacctttttttt

SEQ ID NO: 132 - RNA, 152 nt, synthetic construct
  misc_feature 1..152: note = Description of Artificial Sequence: Synthetic polynucleotide
  source 1..152: mol_type = other RNA
gcctcaggaaggttctggctggttttagagctagaaatagcaagttaaaataaggctagtccgttatcaacttgaaaaagtggcaccgagtcggtgcaaggggtgttcactgctggcctccgcagtccccaccacagccagaaccttttttt

SEQ ID NO: 133 - RNA, 153 nt, synthetic construct
  misc_feature 1..153: note = Description of Artificial Sequence: Synthetic polynucleotide
  source 1..153: mol_type = other RNA
gcctcaggaaggttctggctggttttagagctagaaatagcaagttaaaataaggctagtccgttatcaacttgaaaaagtggcaccgagtcggtgcggtgttcactgctggcctccgcagtccccaccacagccagaaccttcctttttttt

SEQ ID NO: 134 - RNA, 153 nt, synthetic construct
  misc_feature 1..153: note = Description of Artificial Sequence: Synthetic polynucleotide
  source 1..153: mol_type = other RNA
gcctcaggaaggttctggctggttttagagctagaaatagcaagttaaaataaggctagtccgttatcaacttgaaaaagtggcaccgagtcggtgcaaggggtgttcactgctggcctccgcagtccccaccacagccagaacctttttttt

SEQ ID NO: 135 - RNA, 153 nt, synthetic construct
  misc_feature 1..153: note = Description of Artificial Sequence: Synthetic polynucleotide
  source 1..153: mol_type = other RNA
gcctcaggaaggttctggctggttttagagctagaaatagcaagttaaaataaggctagtccgttatcaacttgaaaaagtggcaccgagtcggtgcaggggtgttcactgctggcctccgcagtccccaccacagccagaaccttttttttt

SEQ ID NO: 136 - RNA, 153 nt, synthetic construct
  misc_feature 1..153: note = Description of Artificial Sequence: Synthetic polynucleotide
  source 1..153: mol_type = other RNA
gcctcaggaaggttctggctggttttagagctagaaatagcaagttaaaataaggctagtccgttatcaacttgaaaaagtggcaccgagtcggtgcgggtgttcactgctggcctccgcagtccccaccacagccagaaccttccttttttt

SEQ ID NO: 137 - RNA, 153 nt, synthetic construct
  misc_feature 1..153: note = Description of Artificial Sequence: Synthetic polynucleotide
  source 1..153: mol_type = other RNA
gcctcaggaaggttctggctggttttagagctagaaatagcaagttaaaataaggctagtccgttatcaacttgaaaaagtggcaccgagtcggtgcggggtgttcactgctggcctccgcagtccccaccacagccagaaccttcttttttt

SEQ ID NO: 138 - RNA, 154 nt, synthetic construct
  misc_feature 1..154: note = Description of Artificial Sequence: Synthetic polynucleotide
  source 1..154: mol_type = other RNA
gcctcaggaaggttctggctggttttagagctagaaatagcaagttaaaataaggctagtccgttatcaacttgaaaaagtggcaccgagtcggtgcaggggtgttcactgctggcctccgcagtccccaccacagccagaaccttcttttttt

SEQ ID NO: 139 - RNA, 154 nt, synthetic construct
  misc_feature 1..154: note = Description of Artificial Sequence: Synthetic polynucleotide
  source 1..154: mol_type = other RNA
gcctcaggaaggttctggctggttttagagctagaaatagcaagttaaaataaggctagtccgttatcaacttgaaaaagtggcaccgagtcggtgcaaggggtgttcactgctggcctccgcagtccccaccacagccagaaccttttttttt

SEQ ID NO: 140 - RNA, 154 nt, synthetic construct
  misc_feature 1..154: note = Description of Artificial Sequence: Synthetic polynucleotide
  source 1..154: mol_type = other RNA
gcctcaggaaggttctggctggttttagagctagaaatagcaagttaaaataaggctagtccgttatcaacttgaaaaagtggcaccgagtcggtgcggtgttcactgctggcctccgcagtccccaccacagccagaaccttcctgttttttt

SEQ ID NO: 141 - RNA, 154 nt, synthetic construct
  misc_feature 1..154: note = Description of Artificial Sequence: Synthetic polynucleotide
  source 1..154: mol_type = other RNA
gcctcaggaaggttctggctggttttagagctagaaatagcaagttaaaataaggctagtccgttatcaacttgaaaaagtggcaccgagtcggtgcggggtgttcactgctggcctccgcagtccccaccacagccagaaccttccttttttt

SEQ ID NO: 142 - RNA, 154 nt, synthetic construct
  misc_feature 1..154: note = Description of Artificial Sequence: Synthetic polynucleotide
  source 1..154: mol_type = other RNA
gcctcaggaaggttctggctggttttagagctagaaatagcaagttaaaataaggctagtccgttatcaacttgaaaaagtggcaccgagtcggtgcgggtgttcactgctggcctccgcagtccccaccacagccagaaccttcctttttttt

SEQ ID NO: 143 - RNA, 155 nt, synthetic construct
  misc_feature 1..155: note = Description of Artificial Sequence: Synthetic polynucleotide
  source 1..155: mol_type = other RNA
gcctcaggaaggttctggctggttttagagctagaaatagcaagttaaaataaggctagtccgttatcaacttgaaaaagtggcaccgagtcggtgcgggtgttcactgctggcctccgcagtccccaccacagccagaaccttcctgttttttt

SEQ ID NO: 144 - RNA, 155 nt, synthetic construct
  misc_feature 1..155: note = Description of Artificial Sequence: Synthetic polynucleotide
  source 1..155: mol_type = other RNA
gcctcaggaaggttctggctggttttagagctagaaatagcaagttaaaataaggctagtccgttatcaacttgaaaaagtggcaccgagtcggtgcaaggggtgttcactgctggcctccgcagtccccaccacagccagaaccttcttttttt

SEQ ID NO: 145 - RNA, 155 nt, synthetic construct
  misc_feature 1..155: note = Description of Artificial Sequence: Synthetic polynucleotide
  source 1..155: mol_type = other RNA
gcctcaggaaggttctggctggttttagagctagaaatagcaagttaaaataaggctagtccgttatcaacttgaaaaagtggcaccgagtcggtgcaggggtgttcactgctggcctccgcagtccccaccacagccagaaccttccttttttt

SEQ ID NO: 146 - RNA, 155 nt, synthetic construct
  misc_feature 1..155: note = Description of Artificial Sequence: Synthetic polynucleotide
  source 1..155: mol_type = other RNA
gcctcaggaaggttctggctggttttagagctagaaatagcaagttaaaataaggctagtccgttatcaacttgaaaaagtggcaccgagtcggtgcggggtgttcactgctggcctccgcagtccccaccacagccagaaccttcctttttttt

SEQ ID NO: 147 - RNA, 156 nt, synthetic construct
  misc_feature 1..156: note = Description of Artificial Sequence: Synthetic polynucleotide
  source 1..156: mol_type = other RNA
gcctcaggaaggttctggctggttttagagctagaaatagcaagttaaaataaggctagtccgttatcaacttgaaaaagtggcaccgagtcggtgcaggggtgttcactgctggcctccgcagtccccaccacagccagaaccttcctttttttt

SEQ ID NO: 148 - RNA, 156 nt, synthetic construct
  misc_feature 1..156: note = Description of Artificial Sequence: Synthetic polynucleotide
  source 1..156: mol_type = other RNA
gcctcaggaaggttctggctggttttagagctagaaatagcaagttaaaataaggctagtccgttatcaacttgaaaaagtggcaccgagtcggtgcaaggggtgttcactgctggcctccgcagtccccaccacagccagaaccttccttttttt

SEQ ID NO: 149 - RNA, 156 nt, synthetic construct
  misc_feature 1..156: note = Description of Artificial Sequence: Synthetic polynucleotide
  source 1..156: mol_type = other RNA
gcctcaggaaggttctggctggttttagagctagaaatagcaagttaaaataaggctagtccgttatcaacttgaaaaagtggcaccgagtcggtgcggggtgttcactgctggcctccgcagtccccaccacagccagaaccttcctgttttttt

SEQ ID NO: 150 - RNA, 157 nt, synthetic construct
  misc_feature 1..157: note = Description of Artificial Sequence: Synthetic polynucleotide
  source 1..157: mol_type = other RNA
gcctcaggaaggttctggctggttttagagctagaaatagcaagttaaaataaggctagtccgttatcaacttgaaaaagtggcaccgagtcggtgcaggggtgttcactgctggcctccgcagtccccaccacagccagaaccttcctgttttttt

SEQ ID NO: 151 - RNA, 157 nt, synthetic construct
  misc_feature 1..157: note = Description of Artificial Sequence: Synthetic polynucleotide
  source 1..157: mol_type = other RNA
gcctcaggaaggttctggctggttttagagctagaaatagcaagttaaaataaggctagtccgttatcaacttgaaaaagtggcaccgagtcggtgcaaggggtgttcactgctggcctccgcagtccccaccacagccagaaccttcctttttttt

SEQ ID NO: 152 - RNA, 158 nt, synthetic construct
  misc_feature 1..158: note = Description of Artificial Sequence: Synthetic polynucleotide
  source 1..158: mol_type = other RNA
gcctcaggaaggttctggctggttttagagctagaaatagcaagttaaaataaggctagtccgttatcaacttgaaaaagtggcaccgagtcggtgcaaggggtgttcactgctggcctccgcagtccccaccacagccagaaccttcctgttttttt

SEQ ID NO: 153 - RNA, 96 nt, synthetic construct
  misc_feature 1..96: note = Description of Artificial Sequence: Synthetic oligonucleotide
  source 1..96: mol_type = other RNA
catgaccctggggacgccatgttttagagctagaaatagcaagttaaaataaggctagtccgttatcaacttgaaaaagtggcaccgagtcggtgc

SEQ ID NO: 154 - RNA, 96 nt, synthetic construct
  misc_feature 1..96: note = Description of Artificial Sequence: Synthetic oligonucleotide
  source 1..96: mol_type = other RNA
aaccttcctgaggggcagtggttttagagctagaaatagcaagttaaaataaggctagtccgttatcaacttgaaaaagtggcaccgagtcggtgc

SEQ ID NO: 155 - RNA, 96 nt, synthetic construct
  misc_feature 1..96: note = Description of Artificial Sequence: Synthetic oligonucleotide
  source 1..96: mol_type = other RNA
gtgtggccacatcccccagcgttttagagctagaaatagcaagttaaaataaggctagtccgttatcaacttgaaaaagtggcaccgagtcggtgc

SEQ ID NO: 156 - RNA, 96 nt, synthetic construct
  misc_feature 1..96: note = Description of Artificial Sequence: Synthetic oligonucleotide
  source 1..96: mol_type = other RNA
cctggggacgccatgggtaagttttagagctagaaatagcaagttaaaataaggctagtccgttatcaacttgaaaaagtggcaccgagtcggtgc

SEQ ID NO: 157 - RNA, 96 nt, synthetic construct
  misc_feature 1..96: note = Description of Artificial Sequence: Synthetic oligonucleotide
  source 1..96: mol_type = other RNA
cacagccagaaccttcctgagttttagagctagaaatagcaagttaaaataaggctagtccgttatcaacttgaaaaagtggcaccgagtcggtgc

SEQ ID NO: 158 - RNA, 96 nt, synthetic construct
  misc_feature 1..96: note = Description of Artificial Sequence: Synthetic oligonucleotide
  source 1..96: mol_type = other RNA
ggagcacccgcatgaccctggttttagagctagaaatagcaagttaaaataaggctagtccgttatcaacttgaaaaagtggcaccgagtcggtgc

SEQ ID NO: 159 - RNA, 96 nt, synthetic construct
  misc_feature 1..96: note = Description of Artificial Sequence: Synthetic oligonucleotide
  source 1..96: mol_type = other RNA
acagccagaaccttcctgaggttttagagctagaaatagcaagttaaaataaggctagtccgttatcaacttgaaaaagtggcaccgagtcggtgc

SEQ ID NO: 160 - RNA, 96 nt, synthetic construct
  misc_feature 1..96: note = Description of Artificial Sequence: Synthetic oligonucleotide
  source 1..96: mol_type = other RNA
tttggtgactgccacgcccagttttagagctagaaatagcaagttaaaataaggctagtccgttatcaacttgaaaaagtggcaccgagtcggtgc

SEQ ID NO: 161 - RNA, 96 nt, synthetic construct
  misc_feature 1..96: note = Description of Artificial Sequence: Synthetic oligonucleotide
  source 1..96: mol_type = other RNA
gagcattggcggggagggcagttttagagctagaaatagcaagttaaaataaggctagtccgttatcaacttgaaaaagtggcaccgagtcggtgc

SEQ ID NO: 162 - RNA, 96 nt, synthetic construct
  misc_feature 1..96: note = Description of Artificial Sequence: Synthetic oligonucleotide
  source 1..96: mol_type = other RNA
gcatgaccctggggacgccagttttagagctagaaatagcaagttaaaataaggctagtccgttatcaacttgaaaaagtggcaccgagtcggtgc

SEQ ID NO: 163 - RNA, 96 nt, synthetic construct
  misc_feature 1..96: note = Description of Artificial Sequence: Synthetic oligonucleotide
  source 1..96: mol_type = other RNA
aggagcacccgcatgaccctgttttagagctagaaatagcaagttaaaataaggctagtccgttatcaacttgaaaaagtggcaccgagtcggtgc

SEQ ID NO: 164 - RNA, 96 nt, synthetic construct
  misc_feature 1..96: note = Description of Artificial Sequence: Synthetic oligonucleotide
  source 1..96: mol_type = other RNA
gcccaaggggtgttcactgcgttttagagctagaaatagcaagttaaaataaggctagtccgttatcaacttgaaaaagtggcaccgagtcggtgc

SEQ ID NO: 165 - RNA, 96 nt, synthetic construct
  misc_feature 1..96: note = Description of Artificial Sequence: Synthetic oligonucleotide
  source 1..96: mol_type = other RNA
ccacagccagaaccttcctggttttagagctagaaatagcaagttaaaataaggctagtccgttatcaacttgaaaaagtggcaccgagtcggtgc

SEQ ID NO: 166 - RNA, 96 nt, synthetic construct
  misc_feature 1..96: note = Description of Artificial Sequence: Synthetic oligonucleotide
  source 1..96: mol_type = other RNA
agagcattggcggggagggcgttttagagctagaaatagcaagttaaaataaggctagtccgttatcaacttgaaaaagtggcaccgagtcggtgc

SEQ ID NO: 167 - RNA, 96 nt, synthetic construct
  misc_feature 1..96: note = Description of Artificial Sequence: Synthetic oligonucleotide
  source 1..96: mol_type = other RNA
caggagcacccgcatgacccgttttagagctagaaatagcaagttaaaataaggctagtccgttatcaacttgaaaaagtggcaccgagtcggtgc

SEQ ID NO: 168 - RNA, 96 nt, synthetic construct
  misc_feature 1..96: note = Description of Artificial Sequence: Synthetic oligonucleotide
  source 1..96: mol_type = other RNA
acgtacctctttacagtattgttttagagctagaaatagcaagttaaaataaggctagtccgttatcaacttgaaaaagtggcaccgagtcggtgc

SEQ ID NO: 169 - RNA, 96 nt, synthetic construct
  misc_feature 1..96: note = Description of Artificial Sequence: Synthetic oligonucleotide
  source 1..96: mol_type = other RNA
ttggtgactgccacgcccaagttttagagctagaaatagcaagttaaaataaggctagtccgttatcaacttgaaaaagtggcaccgagtcggtgc

SEQ ID NO: 170 - RNA, 97 nt, synthetic construct
  misc_feature 1..97: note = Description of Artificial Sequence: Synthetic oligonucleotide
  source 1..97: mol_type = other RNA
gcatgaccctggggacgccatgttttagagctagaaatagcaagttaaaataaggctagtccgttatcaacttgaaaaagtggcaccgagtcggtgc

SEQ ID NO: 171 - RNA, 97 nt, synthetic construct
  misc_feature 1..97: note = Description of Artificial Sequence: Synthetic oligonucleotide
  source 1..97: mol_type = other RNA
gccacagccagaaccttcctggttttagagctagaaatagcaagttaaaataaggctagtccgttatcaacttgaaaaagtggcaccgagtcggtgc

SEQ ID NO: 172 - RNA, 97 nt, synthetic construct
  misc_feature 1..97: note = Description of Artificial Sequence: Synthetic oligonucleotide
  source 1..97: mol_type = other RNA
gtttggtgactgccacgcccagttttagagctagaaatagcaagttaaaataaggctagtccgttatcaacttgaaaaagtggcaccgagtcggtgc

SEQ ID NO: 173 - RNA, 97 nt, synthetic construct
  misc_feature 1..97: note = Description of Artificial Sequence: Synthetic oligonucleotide
  source 1..97: mol_type = other RNA
gcaggagcacccgcatgacccgttttagagctagaaatagcaagttaaaataaggctagtccgttatcaacttgaaaaagtggcaccgagtcggtgc

SEQ ID NO: 174 - RNA, 97 nt, synthetic construct
  misc_feature 1..97: note = Description of Artificial Sequence: Synthetic oligonucleotide
  source 1..97: mol_type = other RNA
gcctggggacgccatgggtaagttttagagctagaaatagcaagttaaaataaggctagtccgttatcaacttgaaaaagtggcaccgagtcggtgc

SEQ ID NO: 175 - RNA, 97 nt, synthetic construct
  misc_feature 1..97: note = Description of Artificial Sequence: Synthetic oligonucleotide
  source 1..97: mol_type = other RNA
gacgtacctctttacagtattgttttagagctagaaatagcaagttaaaataaggctagtccgttatcaacttgaaaaagtggcaccgagtcggtgc

SEQ ID NO: 176 - RNA, 97 nt, synthetic construct
  misc_feature 1..97: note = Description of Artificial Sequence: Synthetic oligonucleotide
  source 1..97: mol_type = other RNA
gttggtgactgccacgcccaagttttagagctagaaatagcaagttaaaataaggctagtccgttatcaacttgaaaaagtggcaccgagtcggtgc

SEQ ID NO: 177 - RNA, 97 nt, synthetic construct
  misc_feature 1..97: note = Description of Artificial Sequence: Synthetic oligonucleotide
  source 1..97: mol_type = other RNA
gagagcattggcggggagggcgttttagagctagaaatagcaagttaaaataaggctagtccgttatcaacttgaaaaagtggcaccgagtcggtgc

SEQ ID NO: 178 - RNA, 97 nt, synthetic construct
  misc_feature 1..97: note = Description of Artificial Sequence: Synthetic oligonucleotide
  source 1..97: mol_type = other RNA
gaggagcacccgcatgaccctgttttagagctagaaatagcaagttaaaataaggctagtccgttatcaacttgaaaaagtggcaccgagtcggtgc

SEQ ID NO: 179 - RNA, 97 nt, synthetic construct
  misc_feature 1..97: note = Description of Artificial Sequence: Synthetic oligonucleotide
  source 1..97: mol_type = other RNA
gacagccagaaccttcctgaggttttagagctagaaatagcaagttaaaataaggctagtccgttatcaacttgaaaaagtggcaccgagtcggtgc

SEQ ID NO: 180 - RNA, 97 nt, synthetic construct
  misc_feature 1..97: note = Description of Artificial Sequence: Synthetic oligonucleotide
  source 1..97: mol_type = other RNA
gcacagccagaaccttcctgagttttagagctagaaatagcaagttaaaataaggctagtccgttatcaacttgaaaaagtggcaccgagtcggtgc

SEQ ID NO: 181 - RNA, 97 nt, synthetic construct
  misc_feature 1..97: note = Description of Artificial Sequence: Synthetic oligonucleotide
  source 1..97: mol_type = other RNA
gaaccttcctgaggggcagtggttttagagctagaaatagcaagttaaaataaggctagtccgttatcaacttgaaaaagtggcaccgagtcggtgc

SEQ ID NO: 182 - RNA, 20 nt, synthetic construct
  misc_feature 1..20: note = Description of Artificial Sequence: Synthetic oligonucleotide
  source 1..20: mol_type = other RNA
caggaaggttctggctgtgg

SEQ ID NO: 183-185 - skipped (3 entries)

SEQ ID NO: 186 - RNA, 10 nt, synthetic construct
  misc_feature 1..10: note = Description of Artificial Sequence: Synthetic oligonucleotide
  source 1..10: mol_type = other RNA
cagccagaac

SEQ ID NO: 187 - RNA, 11 nt, synthetic construct
  misc_feature 1..11: note = Description of Artificial Sequence: Synthetic oligonucleotide
  source 1..11: mol_type = other RNA
cagccagaacc

SEQ ID NO: 188 - RNA, 12 nt, synthetic construct
  misc_feature 1..12: note = Description of Artificial Sequence: Synthetic oligonucleotide
  source 1..12: mol_type = other RNA
cagccagaacct

SEQ ID NO: 189 - RNA, 13 nt, synthetic construct
  misc_feature 1..13: note = Description of Artificial Sequence: Synthetic oligonucleotide
  source 1..13: mol_type = other RNA
cagccagaacctt

SEQ ID NO: 190 - RNA, 14 nt, synthetic construct
  misc_feature 1..14: note = Description of Artificial Sequence: Synthetic oligonucleotide
  source 1..14: mol_type = other RNA
cagccagaaccttc

SEQ ID NO: 191 - RNA, 15 nt, synthetic construct
  misc_feature 1..15: note = Description of Artificial Sequence: Synthetic oligonucleotide
  source 1..15: mol_type = other RNA
cagccagaaccttcc

SEQ ID NO: 192 - RNA, 16 nt, synthetic construct
  misc_feature 1..16: note = Description of Artificial Sequence: Synthetic oligonucleotide
  source 1..16: mol_type = other RNA
cagccagaaccttcct

SEQ ID NO: 193 - RNA, 17 nt, synthetic construct
  misc_feature 1..17: note = Description of Artificial Sequence: Synthetic oligonucleotide
  source 1..17: mol_type = other RNA
cagccagaaccttcctg

SEQ ID NO: 194 - RNA, 33 nt, synthetic construct
  misc_feature 1..33: note = Description of Artificial Sequence: Synthetic oligonucleotide
  source 1..33: mol_type = other RNA
ggtgttcactgctggcctccgcagtccccacca

SEQ ID NO: 195 - RNA, 34 nt, synthetic construct
  misc_feature 1..34: note = Description of Artificial Sequence: Synthetic oligonucleotide
  source 1..34: mol_type = other RNA
gggtgttcactgctggcctccgcagtccccacca

SEQ ID NO: 196 - RNA, 35 nt, synthetic construct
  misc_feature 1..35: note = Description of Artificial Sequence: Synthetic oligonucleotide
  source 1..35: mol_type = other RNA
ggggtgttcactgctggcctccgcagtccccacca

SEQ ID NO: 197 - RNA, 36 nt, synthetic construct
  misc_feature 1..36: note = Description of Artificial Sequence: Synthetic oligonucleotide
  source 1..36: mol_type = other RNA
aggggtgttcactgctggcctccgcagtccccacca

SEQ ID NO: 198 - RNA, 37 nt, synthetic construct
  misc_feature 1..37: note = Description of Artificial Sequence: Synthetic oligonucleotide
  source 1..37: mol_type = other RNA
aaggggtgttcactgctggcctccgcagtccccacca

SEQ ID NO: 199 - RNA, 20 nt, synthetic construct
  misc_feature 1..20: note = Description of Artificial Sequence: Synthetic oligonucleotide
  source 1..20: mol_type = other RNA
taaaagagcattggcgggga

SEQ ID NO: 200 - RNA, 20 nt, synthetic construct
  misc_feature 1..20: note = Description of Artificial Sequence: Synthetic oligonucleotide
  source 1..20: mol_type = other RNA
ataaaagagcattggcgggg

SEQ ID NO: 201 - RNA, 20 nt, synthetic construct
  misc_feature 1..20: note = Description of Artificial Sequence: Synthetic oligonucleotide
  source 1..20: mol_type = other RNA
atttggtgactgccacgccc

SEQ ID NO: 202 - RNA, 20 nt, synthetic construct
  misc_feature 1..20: note = Description of Artificial Sequence: Synthetic oligonucleotide
  source 1..20: mol_type = other RNA
gcaggagcacccgcatgacc

SEQ ID NO: 203 - RNA, 20 nt, synthetic construct
  misc_feature 1..20: note = Description of Artificial Sequence: Synthetic oligonucleotide
  source 1..20: mol_type = other RNA
aaaagagcattggcggggag

SEQ ID NO: 204 - RNA, 20 nt, synthetic construct
  misc_feature 1..20: note = Description of Artificial Sequence: Synthetic oligonucleotide
  source 1..20: mol_type = other RNA
gaaccttcctgaggggcagt

SEQ ID NO: 205 - RNA, 20 nt, synthetic construct
  misc_feature 1..20: note = Description of Artificial Sequence: Synthetic oligonucleotide
  source 1..20: mol_type = other RNA
cgcccaaggggtgttcactg

SEQ ID NO: 206 - RNA, 20 nt, synthetic construct
  misc_feature 1..20: note = Description of Artificial Sequence: Synthetic oligonucleotide
  source 1..20: mol_type = other RNA
accacagccagaaccttcct

SEQ ID NO: 207 - RNA, 20 nt, synthetic construct
  misc_feature 1..20: note = Description of Artificial Sequence: Synthetic oligonucleotide
  source 1..20: mol_type = other RNA
agtgtggccacatcccccag

SEQ ID NO: 208 - RNA, 20 nt, synthetic construct
  misc_feature 1..20: note = Description of Artificial Sequence: Synthetic oligonucleotide
  source 1..20: mol_type = other RNA
aagagcattggcggggaggg

SEQ ID NO: 209 - RNA, 20 nt, synthetic construct
  misc_feature 1..20: note = Description of Artificial Sequence: Synthetic oligonucleotide
  source 1..20: mol_type = other RNA
cacgtacctctttacagtat

SEQ ID NO: 210 - RNA, 136 nt, synthetic construct
  misc_feature 1..136: note = Description of Artificial Sequence: Synthetic polynucleotide
  source 1..136: mol_type = other RNA
caggaaggttctggctgtgggttttagagctagaaatagcaagttaaaataaggctagtccgttatcaacttgaaaaagtggcaccgagtcggtgcggtgttcactgctggcctccgcagtccccaccacagccag

SEQ ID NO: 211 - RNA, 137 nt, synthetic construct
  misc_feature 1..137: note = Description of Artificial Sequence: Synthetic polynucleotide
  source 1..137: mol_type = other RNA
caggaaggttctggctgtgggttttagagctagaaatagcaagttaaaataaggctagtccgttatcaacttgaaaaagtggcaccgagtcggtgcggtgttcactgctggcctccgcagtccccaccacagccaga

SEQ ID NO: 212 - RNA, 137 nt, synthetic construct
  misc_feature 1..137: note = Description of Artificial Sequence: Synthetic polynucleotide
  source 1..137: mol_type = other RNA
caggaaggttctggctgtgggttttagagctagaaatagcaagttaaaataaggctagtccgttatcaacttgaaaaagtggcaccgagtcggtgcgggtgttcactgctggcctccgcagtccccaccacagccag

SEQ ID NO: 213 - RNA, 138 nt, synthetic construct
  misc_feature 1..138: note = Description of Artificial Sequence: Synthetic polynucleotide
  source 1..138: mol_type = other RNA
caggaaggttctggctgtgggttttagagctagaaatagcaagttaaaataaggctagtccgttatcaacttgaaaaagtggcaccgagtcggtgcggtgttcactgctggcctccgcagtccccaccacagccagaa

SEQ ID NO: 214 - RNA, 138 nt, synthetic construct
  misc_feature 1..138: note = Description of Artificial Sequence: Synthetic polynucleotide
  source 1..138: mol_type = other RNA
caggaaggttctggctgtgggttttagagctagaaatagcaagttaaaataaggctagtccgttatcaacttgaaaaagtggcaccgagtcggtgcggggtgttcactgctggcctccgcagtccccaccacagccag

SEQ ID NO: 215 - RNA, 138 nt, synthetic construct
  misc_feature 1..138: note = Description of Artificial Sequence: Synthetic polynucleotide
  source 1..138: mol_type = other RNA
caggaaggttctggctgtgggttttagagctagaaatagcaagttaaaataaggctagtccgttatcaacttgaaaaagtggcaccgagtcggtgcgggtgttcactgctggcctccgcagtccccaccacagccaga

SEQ ID NO: 216 - RNA, 139 nt, synthetic construct
  misc_feature 1..139: note = Description of Artificial Sequence: Synthetic polynucleotide
  source 1..139: mol_type = other RNA
caggaaggttctggctgtgggttttagagctagaaatagcaagttaaaataaggctagtccgttatcaacttgaaaaagtggcaccgagtcggtgcgggtgttcactgctggcctccgcagtccccaccacagccagaa

SEQ ID NO: 217 - RNA, 139 nt, synthetic construct
  misc_feature 1..139: note = Description of Artificial Sequence: Synthetic polynucleotide
  source 1..139: mol_type = other RNA
caggaaggttctggctgtgggttttagagctagaaatagcaagttaaaataaggctagtccgttatcaacttgaaaaagtggcaccgagtcggtgcggggtgttcactgctggcctccgcagtccccaccacagccaga

SEQ ID NO: 218 - RNA, 139 nt, synthetic construct
  misc_feature 1..139: note = Description of Artificial Sequence: Synthetic polynucleotide
  source 1..139: mol_type = other RNA
caggaaggttctggctgtgggttttagagctagaaatagcaagttaaaataaggctagtccgttatcaacttgaaaaagtggcaccgagtcggtgcaggggtgttcactgctggcctccgcagtccccaccacagccag

SEQ ID NO: 219 - RNA, 139 nt, synthetic construct
  misc_feature 1..139: note = Description of Artificial Sequence: Synthetic polynucleotide
  source 1..139: mol_type = other RNA
caggaaggttctggctgtgggttttagagctagaaatagcaagttaaaataaggctagtccgttatcaacttgaaaaagtggcaccgagtcggtgcggtgttcactgctggcctccgcagtccccaccacagccagaac

SEQ ID NO: 220 - RNA, 140 nt, synthetic construct
  misc_feature 1..140: note = Description of Artificial Sequence: Synthetic polynucleotide
  source 1..140: mol_type = other RNA
caggaaggttctggctgtgggttttagagctagaaatagcaagttaaaataaggctagtccgttatcaacttgaaaaagtggcaccgagtcggtgcggggtgttcactgctggcctccgcagtccccaccacagccagaa

SEQ ID NO: 221 - RNA, 140 nt, synthetic construct
  misc_feature 1..140: note = Description of Artificial Sequence: Synthetic polynucleotide
  source 1..140: mol_type = other RNA
caggaaggttctggctgtgggttttagagctagaaatagcaagttaaaataaggctagtccgttatcaacttgaaaaagtggcaccgagtcggtgcaggggtgttcactgctggcctccgcagtccccaccacagccaga

SEQ ID NO: 222 - RNA, 140 nt, synthetic construct
  misc_feature 1..140: note = Description of Artificial Sequence: Synthetic polynucleotide
  source 1..140: mol_type = other RNA
caggaaggttctggctgtgggttttagagctagaaatagcaagttaaaataaggctagtccgttatcaacttgaaaaagtggcaccgagtcggtgcggtgttcactgctggcctccgcagtccccaccacagccagaacc

SEQ ID NO: 223 - RNA, 140 nt, synthetic construct
  misc_feature 1..140: note = Description of Artificial Sequence: Synthetic polynucleotide
  source 1..140: mol_type = other RNA
caggaaggttctggctgtgggttttagagctagaaatagcaagttaaaataaggctagtccgttatcaacttgaaaaagtggcaccgagtcggtgcaaggggtgttcactgctggcctccgcagtccccaccacagccag

SEQ ID NO: 224 - RNA, 140 nt, synthetic construct
  misc_feature 1..140: note = Description of Artificial Sequence: Synthetic polynucleotide
  source 1..140: mol_type = other RNA
caggaaggttctggctgtgggttttagagctagaaatagcaagttaaaataaggctagtccgttatcaacttgaaaaagtggcaccgagtcggtgcgggtgttcactgctggcctccgcagtccccaccacagccagaac

SEQ ID NO: 225 - RNA, 141 nt, synthetic construct
  misc_feature 1..141: note = Description of Artificial Sequence: Synthetic polynucleotide
  source 1..141: mol_type = other RNA
caggaaggttctggctgtgggttttagagctagaaatagcaagttaaaataaggctagtccgttatcaacttgaaaaagtggcaccgagtcggtgcggtgttcactgctggcctccgcagtccccaccacagccagaacct

SEQ ID NO: 226 - RNA, 141 nt, synthetic construct
  misc_feature 1..141: note = Description of Artificial Sequence: Synthetic polynucleotide
  source 1..141: mol_type = other RNA
caggaaggttctggctgtgggttttagagctagaaatagcaagttaaaataaggctagtccgttatcaacttgaaaaagtggcaccgagtcggtgcggggtgttcactgctggcctccgcagtccccaccacagccagaac

SEQ ID NO: 227 - RNA, 141 nt, synthetic construct
  misc_feature 1..141: note = Description of Artificial Sequence: Synthetic polynucleotide
  source 1..141: mol_type = other RNA
caggaaggttctggctgtgggttttagagctagaaatagcaagttaaaataaggctagtccgttatcaacttgaaaaagtggcaccgagtcggtgcaggggtgttcactgctggcctccgcagtccccaccacagccagaa

SEQ ID NO: 228 - RNA, 141 nt, synthetic construct
  misc_feature 1..141: note = Description of Artificial Sequence: Synthetic polynucleotide
  source 1..141: mol_type = other RNA
caggaaggttctggctgtgggttttagagctagaaatagcaagttaaaataaggctagtccgttatcaacttgaaaaagtggcaccgagtcggtgcaaggggtgttcactgctggcctccgcagtccccaccacagccaga

SEQ ID NO: 229 - RNA, 141 nt, synthetic construct
  misc_feature 1..141: note = Description of Artificial Sequence: Synthetic polynucleotide
  source 1..141: mol_type = other RNA
caggaaggttctggctgtgggttttagagctagaaatagcaagttaaaataaggctagtccgttatcaacttgaaaaagtggcaccgagtcggtgcgggtgttcactgctggcctccgcagtccccaccacagccagaacc

SEQ ID NO: 230 - RNA, 142 nt, synthetic construct
  misc_feature 1..142: note = Description of Artificial Sequence: Synthetic polynucleotide
  source 1..142: mol_type = other RNA
caggaaggttctggctgtgggttttagagctagaaatagcaagttaaaataaggctagtccgttatcaacttgaaaaagtggcaccgagtcggtgcggggtgttcactgctggcctccgcagtccccaccacagccagaacc

SEQ ID NO: 231 - RNA, 142 nt, synthetic construct
  misc_feature 1..142: note = Description of Artificial Sequence: Synthetic polynucleotide
  source 1..142: mol_type = other RNA
caggaaggttctggctgtgggttttagagctagaaatagcaagttaaaataaggctagtccgttatcaacttgaaaaagtggcaccgagtcggtgcggtgttcactgctggcctccgcagtccccaccacagccagaacctt

SEQ ID NO: 232 - RNA, 142 nt, synthetic construct
  misc_feature 1..142: note = Description of Artificial Sequence: Synthetic polynucleotide
  source 1..142: mol_type = other RNA
caggaaggttctggctgtgggttttagagctagaaatagcaagttaaaataaggctagtccgttatcaacttgaaaaagtggcaccgagtcggtgcaaggggtgttcactgctggcctccgcagtccccaccacagccagaa

SEQ ID NO: 233 - RNA, 142 nt, synthetic construct
  misc_feature 1..142: note = Description of Artificial Sequence: Synthetic polynucleotide
  source 1..142: mol_type = other RNA
caggaaggttctggctgtgggttttagagctagaaatagcaagttaaaataaggctagtccgttatcaacttgaaaaagtggcaccgagtcggtgcaggggtgttcactgctggcctccgcagtccccaccacagccagaac

SEQ ID NO: 234 - RNA, 142 nt, synthetic construct
  misc_feature 1..142: note = Description of Artificial Sequence: Synthetic polynucleotide
  source 1..142: mol_type = other RNA
caggaaggttctggctgtgggttttagagctagaaatagcaagttaaaataaggctagtccgttatcaacttgaaaaagtggcaccgagtcggtgcgggtgttcactgctggcctccgcagtccccaccacagccagaacct

SEQ ID NO: 235 - RNA, 143 nt, synthetic construct
  misc_feature 1..143: note = Description of Artificial Sequence: Synthetic polynucleotide
  source 1..143: mol_type = other RNA
caggaaggttctggctgtgggttttagagctagaaatagcaagttaaaataaggctagtccgttatcaacttgaaaaagtggcaccgagtcggtgcaaggggtgttcactgctggcctccgcagtccccaccacagccagaac

SEQ ID NO: 236 - RNA, 143 nt, synthetic construct
  misc_feature 1..143: note = Description of Artificial Sequence: Synthetic polynucleotide
  source 1..143: mol_type = other RNA
caggaaggttctggctgtgggttttagagctagaaatagcaagttaaaataaggctagtccgttatcaacttgaaaaagtggcaccgagtcggtgcggtgttcactgctggcctccgcagtccccaccacagccagaaccttc

SEQ ID NO: 237 - RNA, 143 nt, synthetic construct
  misc_feature 1..143: note = Description of Artificial Sequence: Synthetic polynucleotide
  source 1..143: mol_type = other RNA
caggaaggttctggctgtgggttttagagctagaaatagcaagttaaaataaggctagtccgttatcaacttgaaaaagtggcaccgagtcggtgcaggggtgttcactgctggcctccgcagtccccaccacagccagaacc

SEQ ID NO: 238 - RNA, 143 nt, synthetic construct
  misc_feature 1..143: note = Description of Artificial Sequence: Synthetic polynucleotide
  source 1..143: mol_type = other RNA
caggaaggttctggctgtgggttttagagctagaaatagcaagttaaaataaggctagtccgttatcaacttgaaaaagtggcaccgagtcggtgcggggtgttcactgctggcctccgcagtccccaccacagccagaacct

SEQ ID NO: 239 - RNA, 143 nt, synthetic construct
  misc_feature 1..143: note = Description of Artificial Sequence: Synthetic polynucleotide
  source 1..143: mol_type = other RNA
caggaaggttctggctgtgggttttagagctagaaatagcaagttaaaataaggctagtccgttatcaacttgaaaaagtggcaccgagtcggtgcgggtgttcactgctggcctccgcagtccccaccacagccagaacctt

SEQ ID NO: 240 - RNA, 144 nt, synthetic construct
  misc_feature 1..144: note = Description of Artificial Sequence: Synthetic polynucleotide
  source 1..144: mol_type = other RNA
caggaaggttctggctgtgggttttagagctagaaatagcaagttaaaataaggctagtccgttatcaacttgaaaaagtggcaccgagtcggtgcaaggggtgttcactgctggcctccgcagtccccaccacagccagaacc

SEQ ID NO: 241 - RNA, 144 nt, synthetic construct
  misc_feature 1..144: note = Description of Artificial Sequence: Synthetic polynucleotide
  source 1..144: mol_type = other RNA
caggaaggttctggctgtgggttttagagctagaaatagcaagttaaaataaggctagtccgttatcaacttgaaaaagtggcaccgagtcggtgcggggtgttcactgctggcctccgcagtccccaccacagccagaacctt

SEQ ID NO: 242 - RNA, 144 nt, synthetic construct
  misc_feature 1..144: note = Description of Artificial Sequence: Synthetic polynucleotide
  source 1..144: mol_type = other RNA
caggaaggttctggctgtgggttttagagctagaaatagcaagttaaaataaggctagtccgttatcaacttgaaaaagtggcaccgagtcggtgcaggggtgttcactgctggcctccgcagtccccaccacagccagaacct

SEQ ID NO: 243 - RNA, 144 nt, synthetic construct
  misc_feature 1..144: note = Description of Artificial Sequence: Synthetic polynucleotide
  source 1..144: mol_type = other RNA
caggaaggttctggctgtgggttttagagctagaaatagcaagttaaaataaggctagtccgttatcaacttgaaaaagtggcaccgagtcggtgcgggtgttcactgctggcctccgcagtccccaccacagccagaaccttc

SEQ ID NO: 244 - RNA, 144 nt, synthetic construct
  misc_feature 1..144: note = Description of Artificial Sequence: Synthetic polynucleotide
  source 1..144: mol_type = other RNA
gcaggaaggttctggctgtgggttttagagctagaaatagcaagttaaaataaggctagtccgttatcaacttgaaaaagtggcaccgagtcggtgcggtgttcactgctggcctccgcagtccccaccacagccagttttttt

SEQ ID NO: 245 - RNA, 145 nt, synthetic construct
  misc_feature 1..145: note = Description of Artificial Sequence: Synthetic polynucleotide
  source 1..145: mol_type = other RNA
caggaaggttctggctgtgggttttagagctagaaatagcaagttaaaataaggctagtccgttatcaacttgaaaaagtggcaccgagtcggtgcaggggtgttcactgctggcctccgcagtccccaccacagccagaacctt

SEQ ID NO: 246 - RNA, 145 nt, synthetic construct
  misc_feature 1..145: note = Description of Artificial Sequence: Synthetic polynucleotide
  source 1..145: mol_type = other RNA
gcaggaaggttctggctgtgggttttagagctagaaatagcaagttaaaataaggctagtccgttatcaacttgaaaaagtggcaccgagtcggtgcggtgttcactgctggcctccgcagtccccaccacagccagattttttt

SEQ ID NO: 247 - RNA, 145 nt, synthetic construct
  misc_feature 1..145: note = Description of Artificial Sequence: Synthetic polynucleotide
  source 1..145: mol_type = other RNA
caggaaggttctggctgtgggttttagagctagaaatagcaagttaaaataaggctagtccgttatcaacttgaaaaagtggcaccgagtcggtgcaaggggtgttcactgctggcctccgcagtccccaccacagccagaacct

SEQ ID NO: 248 - RNA, 145 nt, synthetic construct
  misc_feature 1..145: note = Description of Artificial Sequence: Synthetic polynucleotide
  source 1..145: mol_type = other RNA
caggaaggttctggctgtgggttttagagctagaaatagcaagttaaaataaggctagtccgttatcaacttgaaaaagtggcaccgagtcggtgcggggtgttcactgctggcctccgcagtccccaccacagccagaaccttc

SEQ ID NO: 249 - RNA, 145 nt, synthetic construct
  misc_feature 1..145: note = Description of Artificial Sequence: Synthetic polynucleotide
  source 1..145: mol_type = other RNA
gcaggaaggttctggctgtgggttttagagctagaaatagcaagttaaaataaggctagtccgttatcaacttgaaaaagtggcaccgagtcggtgcgggtgttcactgctggcctccgcagtccccaccacagccagttttttt

SEQ ID NO: 250 - RNA, 146 nt, synthetic construct
  misc_feature 1..146: note = Description of Artificial Sequence: Synthetic polynucleotide
  source 1..146: mol_type = other RNA
caggaaggttctggctgtgggttttagagctagaaatagcaagttaaaataaggctagtccgttatcaacttgaaaaagtggcaccgagtcggtgcaaggggtgttcactgctggcctccgcagtccccaccacagccagaacctt

SEQ ID NO: 251 - RNA, 146 nt, synthetic construct
  misc_feature 1..146: note = Description of Artificial Sequence: Synthetic polynucleotide
  source 1..146: mol_type = other RNA
caggaaggttctggctgtgggttttagagctagaaatagcaagttaaaataaggctagtccgttatcaacttgaaaaagtggcaccgagtcggtgcaggggtgttcactgctggcctccgcagtccccaccacagccagaaccttc

SEQ ID NO: 252 - RNA, 146 nt, synthetic construct
  misc_feature 1..146: note = Description of Artificial Sequence: Synthetic polynucleotide
  source 1..146: mol_type = other RNA
gcaggaaggttctggctgtgggttttagagctagaaatagcaagttaaaataaggctagtccgttatcaacttgaaaaagtggcaccgagtcggtgcggtgttcactgctggcctccgcagtccccaccacagccagaattttttt

SEQ ID NO: 253 - RNA, 146 nt, synthetic construct
  misc_feature 1..146: note = Description of Artificial Sequence: Synthetic polynucleotide
  source 1..146: mol_type = other RNA
gcaggaaggttctggctgtgggttttagagctagaaatagcaagttaaaataaggctagtccgttatcaacttgaaaaagtggcaccgagtcggtgcggggtgttcactgctggcctccgcagtccccaccacagccagttttttt

SEQ ID NO: 254 - RNA, 146 nt, synthetic construct
  misc_feature 1..146: note = Description of Artificial Sequence: Synthetic polynucleotide
  source 1..146: mol_type = other RNA
gcaggaaggttctggctgtgggttttagagctagaaatagcaagttaaaataaggctagtccgttatcaacttgaaaaagtggcaccgagtcggtgcgggtgttcactgctggcctccgcagtccccaccacagccagattttttt

SEQ ID NO: 255 - RNA, 147 nt, synthetic construct
  misc_feature 1..147: note = Description of Artificial Sequence: Synthetic polynucleotide
  source 1..147: mol_type = other RNA
caggaaggttctggctgtgggttttagagctagaaatagcaagttaaaataaggctagtccgttatcaacttgaaaaagtggcaccgagtcggtgcaaggggtgttcactgctggcctccgcagtccccaccacagccagaaccttc

SEQ ID NO: 256 - RNA, 147 nt, synthetic construct
  misc_feature 1..147: note = Description of Artificial Sequence: Synthetic polynucleotide
  source 1..147: mol_type = other RNA
gcaggaaggttctggctgtgggttttagagctagaaatagcaagttaaaataaggctagtccgttatcaacttgaaaaagtggcaccgagtcggtgcggtgttcactgctggcctccgcagtccccaccacagccagaacttttttt

SEQ ID NO: 257 - RNA, 147 nt, synthetic construct
  misc_feature 1..147: note = Description of Artificial Sequence: Synthetic polynucleotide
  source 1..147: mol_type = other RNA
gcaggaaggttctggctgtgggttttagagctagaaatagcaagttaaaataaggctagtccgttatcaacttgaaaaagtggcaccgagtcggtgcgggtgttcactgctggcctccgcagtccccaccacagccagaattttttt

SEQ ID NO: 258 - RNA, 147 nt, synthetic construct
  misc_feature 1..147: note = Description of Artificial Sequence: Synthetic polynucleotide
  source 1..147: mol_type = other RNA
gcaggaaggttctggctgtgggttttagagctagaaatagcaagttaaaataaggctagtccgttatcaacttgaaaaagtggcaccgagtcggtgcggggtgttcactgctggcctccgcagtccccaccacagccagattttttt

SEQ ID NO: 259 - RNA, 147 nt, synthetic construct
  misc_feature 1..147: note = Description of Artificial Sequence: Synthetic polynucleotide
  source 1..147: mol_type = other RNA
gcaggaaggttctggctgtgggttttagagctagaaatagcaagttaaaataaggctagtccgttatcaacttgaaaaagtggcaccgagtcggtgcaggggtgttcactgctggcctccgcagtccccaccacagccagttttttt

SEQ ID NO: 260 - RNA, 148 nt, synthetic construct
  misc_feature 1..148: note = Description of Artificial Sequence: Synthetic polynucleotide
  source 1..148: mol_type = other RNA
gcaggaaggttctggctgtgggttttagagctagaaatagcaagttaaaataaggctagtccgttatcaacttgaaaaagtggcaccgagtcggtgcaaggggtgttcactgctggcctccgcagtccccaccacagccagttttttt

SEQ ID NO: 261 - RNA, 148 nt, synthetic construct
  misc_feature 1..148: note = Description of Artificial Sequence: Synthetic polynucleotide
  source 1..148: mol_type = other RNA
gcaggaaggttctggctgtgggttttagagctagaaatagcaagttaaaataaggctagtccgttatcaacttgaaaaagtggcaccgagtcggtgcaggggtgttcactgctggcctccgcagtccccaccacagccagattttttt

SEQ ID NO: 262 - RNA, 148 nt, synthetic construct
  misc_feature 1..148: note = Description of Artificial Sequence: Synthetic polynucleotide
  source 1..148: mol_type = other RNA
gcaggaaggttctggctgtgggttttagagctagaaatagcaagttaaaataaggctagtccgttatcaacttgaaaaagtggcaccgagtcggtgcgggtgttcactgctggcctccgcagtccccaccacagccagaacttttttt

SEQ ID NO: 263 - RNA, 148 nt, synthetic construct
  misc_feature 1..148: note = Description of Artificial Sequence: Synthetic polynucleotide
  source 1..148: mol_type = other RNA
gcaggaaggttctggctgtgggttttagagctagaaatagcaagttaaaataaggctagtccgttatcaacttgaaaaagtggcaccgagtcggtgcggggtgttcactgctggcctccgcagtccccaccacagccagaattttttt

SEQ ID NO: 264 - RNA, 148 nt, synthetic construct
  misc_feature 1..148: note = Description of Artificial Sequence: Synthetic polynucleotide
  source 1..148: mol_type = other RNA
gcaggaaggttctggctgtgggttttagagctagaaatagcaagttaaaataaggctagtccgttatcaacttgaaaaagtggcaccgagtcggtgcggtgttcactgctggcctccgcagtccccaccacagccagaaccttttttt

SEQ ID NO: 265 - RNA, 149 nt, synthetic construct
  misc_feature 1..149: note = Description of Artificial Sequence: Synthetic polynucleotide
  source 1..149: mol_type = other RNA
gcaggaaggttctggctgtgggttttagagctagaaatagcaagttaaaataaggctagtccgttatcaacttgaaaaagtggcaccgagtcggtgcgggtgttcactgctggcctccgcagtccccaccacagccagaaccttttttt

SEQ ID NO: 266 - RNA, 149 nt, synthetic construct
  misc_feature 1..149: note = Description of Artificial Sequence: Synthetic polynucleotide
  source 1..149: mol_type = other RNA
gcaggaaggttctggctgtgggttttagagctagaaatagcaagttaaaataaggctagtccgttatcaacttgaaaaagtggcaccgagtcggtgcggggtgttcactgctggcctccgcagtccccaccacagccagaacttttttt

SEQ ID NO: 267 - RNA, 149 nt, synthetic construct
  misc_feature 1..149: note = Description of Artificial Sequence: Synthetic polynucleotide
  source 1..149: mol_type = other RNA
gcaggaaggttctggctgtgggttttagagctagaaatagcaagttaaaataaggctagtccgttatcaacttgaaaaagtggcaccgagtcggtgcaaggggtgttcactgctggcctccgcagtccccaccacagccagattttttt

SEQ ID NO: 268 - RNA, 149 nt, synthetic construct
  misc_feature 1..149: note = Description of Artificial Sequence: Synthetic polynucleotide
  source 1..149: mol_type = other RNA
gcaggaaggttctggctgtgggttttagagctagaaatagcaagttaaaataaggctagtccgttatcaacttgaaaaagtggcaccgagtcggtgcaggggtgttcactgctggcctccgcagtccccaccacagccagaattttttt

SEQ ID NO: 269 - RNA, 149 nt, synthetic construct
  misc_feature 1..149: note = Description of Artificial Sequence: Synthetic polynucleotide
  source 1..149: mol_type = other RNA
gcaggaaggttctggctgtgggttttagagctagaaatagcaagttaaaataaggctagtccgttatcaacttgaaaaagtggcaccgagtcggtgcggtgttcactgctggcctccgcagtccccaccacagccagaacctttttttt

SEQ ID NO: 270 - RNA, 150 nt, synthetic construct
  misc_feature 1..150: note = Description of Artificial Sequence: Synthetic polynucleotide
  source 1..150: mol_type = other RNA
gcaggaaggttctggctgtgggttttagagctagaaatagcaagttaaaataaggctagtccgttatcaacttgaaaaagtggcaccgagtcggtgcaggggtgttcactgctggcctccgcagtccccaccacagccagaacttttttt

SEQ ID NO: 271 - RNA, 150 nt, synthetic construct
  misc_feature 1..150: note = Description of Artificial Sequence: Synthetic polynucleotide
  source 1..150: mol_type = other RNA
gcaggaaggttctggctgtgggttttagagctagaaatagcaagttaaaataaggctagtccgttatcaacttgaaaaagtggcaccgagtcggtgcgggtgttcactgctggcctccgcagtccccaccacagccagaacctttttttt

SEQ ID NO: 272 - RNA, 150 nt, synthetic construct
  misc_feature 1..150: note = Description of Artificial Sequence: Synthetic polynucleotide
  source 1..150: mol_type = other RNA
gcaggaaggttctggctgtgggttttagagctagaaatagcaagttaaaataaggctagtccgttatcaacttgaaaaagtggcaccgagtcggtgcggtgttcactgctggcctccgcagtccccaccacagccagaaccttttttttt

SEQ ID NO: 273 - RNA, 150 nt, synthetic construct
  misc_feature 1..150: note = Description of Artificial Sequence: Synthetic polynucleotide
  source 1..150: mol_type = other RNA
gcaggaaggttctggctgtgggttttagagctagaaatagcaagttaaaataaggctagtccgttatcaacttgaaaaagtggcaccgagtcggtgcggggtgttcactgctggcctccgcagtccccaccacagccagaaccttttttt

SEQ ID NO: 274 - RNA, 150 nt, synthetic construct
  misc_feature 1..150: note = Description of Artificial Sequence: Synthetic polynucleotide
  source 1..150: mol_type = other RNA
gcaggaaggttctggctgtgggttttagagctagaaatagcaagttaaaataaggctagtccgttatcaacttgaaaaagtggcaccgagtcggtgcaaggggtgttcactgctggcctccgcagtccccaccacagccagaattttttt

SEQ ID NO: 275 - RNA, 151 nt, synthetic construct
  misc_feature 1..151: note = Description of Artificial Sequence: Synthetic polynucleotide
  source 1..151: mol_type = other RNA
gcaggaaggttctggctgtgggttttagagctagaaatagcaagttaaaataaggctagtccgttatcaacttgaaaaagtggcaccgagtcggtgcaaggggtgttcactgctggcctccgcagtccccaccacagccagaacttttttt

SEQ ID NO: 276 - RNA, 151 nt, synthetic construct
  misc_feature 1..151: note = Description of Artificial Sequence: Synthetic polynucleotide
  source 1..151: mol_type = other RNA
gcaggaaggttctggctgtgggttttagagctagaaatagcaagttaaaataaggctagtccgttatcaacttgaaaaagtggcaccgagtcggtgcggtgttcactgctggcctccgcagtccccaccacagccagaaccttcttttttt

SEQ ID NO: 277 - RNA, 151 nt, synthetic construct
  misc_feature 1..151: note = Description of Artificial Sequence: Synthetic polynucleotide
  source 1..151: mol_type = other RNA
gcaggaaggttctggctgtgggttttagagctagaaatagcaagttaaaataaggctagtccgttatcaacttgaaaaagtggcaccgagtcggtgcgggtgttcactgctggcctccgcagtccccaccacagccagaaccttttttttt

SEQ ID NO: 278 - RNA, 151 nt, synthetic construct
  misc_feature 1..151: note = Description of Artificial Sequence: Synthetic polynucleotide
  source 1..151: mol_type = other RNA
gcaggaaggttctggctgtgggttttagagctagaaatagcaagttaaaataaggctagtccgttatcaacttgaaaaagtggcaccgagtcggtgcggggtgttcactgctggcctccgcagtccccaccacagccagaacctttttttt

SEQ ID NO: 279 - RNA, 151 nt, synthetic construct
  misc_feature 1..151: note = Description of Artificial Sequence: Synthetic polynucleotide
  source 1..151: mol_type = other RNA
gcaggaaggttctggctgtgggttttagagctagaaatagcaagttaaaataaggctagtccgttatcaacttgaaaaagtggcaccgagtcggtgcaggggtgttcactgctggcctccgcagtccccaccacagccagaaccttttttt

SEQ ID NO: 280 - RNA, 152 nt, synthetic construct
  misc_feature 1..152: note = Description of Artificial Sequence: Synthetic polynucleotide
  source 1..152: mol_type = other RNA
gcaggaaggttctggctgtgggttttagagctagaaatagcaagttaaaataaggctagtccgttatcaacttgaaaaagtggcaccgagtcggtgcgggtgttcactgctggcctccgcagtccccaccacagccagaaccttcttttttt

SEQ ID NO: 281 - RNA, 152 nt, synthetic construct
  misc_feature 1..152: note = Description of Artificial Sequence: Synthetic polynucleotide
  source 1..152: mol_type = other RNA
gcaggaaggttctggctgtgggttttagagctagaaatagcaagttaaaataaggctagtccgttatcaacttgaaaaagtggcaccgagtcggtgcggggtgttcactgctggcctccgcagtccccaccacagccagaaccttttttttt

SEQ ID NO: 282 - RNA, 152 nt, synthetic construct
  misc_feature 1..152: note = Description of Artificial Sequence: Synthetic polynucleotide
  source 1..152: mol_type = other RNA
gcaggaaggttctggctgtgggttttagagctagaaatagcaagttaaaataaggctagtccgttatcaacttgaaaaagtggcaccgagtcggtgcaaggggtgttcactgctggcctccgcagtccccaccacagccagaaccttttttt

SEQ ID NO: 283 - RNA, 152 nt, synthetic construct
  misc_feature 1..152: note = Description of Artificial Sequence: Synthetic polynucleotide
  source 1..152: mol_type = other RNA
gcaggaaggttctggctgtgggttttagagctagaaatagcaagttaaaataaggctagtccgttatcaacttgaaaaagtggcaccgagtcggtgcaggggtgttcactgctggcctccgcagtccccaccacagccagaacctttttttt

SEQ ID NO: 284 - RNA, 153 nt, synthetic construct
  misc_feature 1..153: note = Description of Artificial Sequence: Synthetic polynucleotide
  source 1..153: mol_type = other RNA
gcaggaaggttctggctgtgggttttagagctagaaatagcaagttaaaataaggctagtccgttatcaacttgaaaaagtggcaccgagtcggtgcggggtgttcactgctggcctccgcagtccccaccacagccagaaccttcttttttt

SEQ ID NO: 285 - RNA, 153 nt, synthetic construct
  misc_feature 1..153: note = Description of Artificial Sequence: Synthetic polynucleotide
  source 1..153: mol_type = other RNA
gcaggaaggttctggctgtgggttttagagctagaaatagcaagttaaaataaggctagtccgttatcaacttgaaaaagtggcaccgagtcggtgcaggggtgttcactgctggcctccgcagtccccaccacagccagaaccttttttttt

SEQ ID NO: 286 - RNA, 153 nt, synthetic construct
  misc_feature 1..153: note = Description of Artificial Sequence: Synthetic polynucleotide
  source 1..153: mol_type = other RNA
gcaggaaggttctggctgtgggttttagagctagaaatagcaagttaaaataaggctagtccgttatcaacttgaaaaagtggcaccgagtcggtgcaaggggtgttcactgctggcctccgcagtccccaccacagccagaacctttttttt

SEQ ID NO: 287 - RNA, 154 nt, synthetic construct
  misc_feature 1..154: note = Description of Artificial Sequence: Synthetic polynucleotide
  source 1..154: mol_type = other RNA
gcaggaaggttctggctgtgggttttagagctagaaatagcaagttaaaataaggctagtccgttatcaacttgaaaaagtggcaccgagtcggtgcaggggtgttcactgctggcctccgcagtccccaccacagccagaaccttcttttttt

SEQ ID NO: 288 - RNA, 154 nt, synthetic construct
  misc_feature 1..154: note = Description of Artificial Sequence: Synthetic polynucleotide
  source 1..154: mol_type = other RNA
gcaggaaggttctggctgtgggttttagagctagaaatagcaagttaaaataaggctagtccgttatcaacttgaaaaagtggcaccgagtcggtgcaaggggtgttcactgctggcctccgcagtccccaccacagccagaaccttttttttt

SEQ ID NO: 289 - RNA, 155 nt, synthetic construct
  misc_feature 1..155: note = Description of Artificial Sequence: Synthetic polynucleotide
  source 1..155: mol_type = other RNA
gcaggaaggttctggctgtgggttttagagctagaaatagcaagttaaaataaggctagtccgttatcaacttgaaaaagtggcaccgagtcggtgcaaggggtgttcactgctggcctccgcagtccccaccacagccagaaccttcttttttt

SEQ ID NO: 290 - RNA, 96 nt, synthetic construct
  misc_feature 1..96: note = Description of Artificial Sequence: Synthetic oligonucleotide
  source 1..96: mol_type = other RNA
taaaagagcattggcggggagttttagagctagaaatagcaagttaaaataaggctagtccgttatcaacttgaaaaagtggcaccgagtcggtgc

SEQ ID NO: 291 - RNA, 96 nt, synthetic construct
  misc_feature 1..96: note = Description of Artificial Sequence: Synthetic oligonucleotide
  source 1..96: mol_type = other RNA
ataaaagagcattggcgggggttttagagctagaaatagcaagttaaaataaggctagtccgttatcaacttgaaaaagtggcaccgagtcggtgc

SEQ ID NO: 292 - RNA, 97 nt, synthetic construct
  misc_feature 1..97: note = Description of Artificial Sequence: Synthetic oligonucleotide
  source 1..97: mol_type = other RNA
gataaaagagcattggcgggggttttagagctagaaatagcaagttaaaataaggctagtccgttatcaacttgaaaaagtggcaccgagtcggtgc

SEQ ID NO: 293 - RNA, 97 nt, synthetic construct
  misc_feature 1..97: note = Description of Artificial Sequence: Synthetic oligonucleotide
  source 1..97: mol_type = other RNA
gtaaaagagcattggcggggagttttagagctagaaatagcaagttaaaataaggctagtccgttatcaacttgaaaaagtggcaccgagtcggtgc

SEQ ID NO: 294 - RNA, 20 nt, synthetic construct
  misc_feature 1..20: note = Description of Artificial Sequence: Synthetic oligonucleotide
  source 1..20: mol_type = other RNA
aggaaggttctggctgtggt

SEQ ID NO: 295-297 - skipped (3 entries)

SEQ ID NO: 298 - RNA, 10 nt, synthetic construct
  misc_feature 1..10: note = Description of Artificial Sequence: Synthetic oligonucleotide
  source 1..10: mol_type = other RNA
acagccagaa

SEQ ID NO: 299 - RNA, 11 nt, synthetic construct
  misc_feature 1..11: note = Description of Artificial Sequence: Synthetic oligonucleotide
  source 1..11: mol_type = other RNA
acagccagaac

SEQ ID NO: 300 - RNA, 12 nt, synthetic construct
  misc_feature 1..12: note = Description of Artificial Sequence: Synthetic oligonucleotide
  source 1..12: mol_type = other RNA
acagccagaacc

SEQ ID NO: 301 - RNA, 13 nt, synthetic construct
  misc_feature 1..13: note = Description of Artificial Sequence: Synthetic oligonucleotide
  source 1..13: mol_type = other RNA
acagccagaacct

SEQ ID NO: 302 - RNA, 14 nt, synthetic construct
  misc_feature 1..14: note = Description of Artificial Sequence: Synthetic oligonucleotide
  source 1..14: mol_type = other RNA
acagccagaacctt

SEQ ID NO: 303 - RNA, 15 nt, synthetic construct
  misc_feature 1..15: note = Description of Artificial Sequence: Synthetic oligonucleotide
  source 1..15: mol_type = other RNA
acagccagaaccttc

SEQ ID NO: 304 - RNA, 16 nt, synthetic construct
  misc_feature 1..16: note = Description of Artificial Sequence: Synthetic oligonucleotide
  source 1..16: mol_type = other RNA
acagccagaaccttcc

SEQ ID NO: 305 - RNA, 17 nt, synthetic construct
  misc_feature 1..17: note = Description of Artificial Sequence: Synthetic oligonucleotide
  source 1..17: mol_type = other RNA
acagccagaaccttcct

SEQ ID NO: 306 - RNA, 20 nt, synthetic construct
  misc_feature 1..20: note = Description of Artificial Sequence: Synthetic oligonucleotide
  source 1..20: mol_type = other RNA
tggcctccgcagtccccacc

SEQ ID NO: 307 - RNA, 22 nt, synthetic construct
  misc_feature 1..22: note = Description of Artificial Sequence: Synthetic oligonucleotide
  source 1..22: mol_type = other RNA
gctggcctccgcagtccccacc

SEQ ID NO: 308 - RNA, 24 nt, synthetic construct
  misc_feature 1..24: note = Description of Artificial Sequence: Synthetic oligonucleotide
  source 1..24: mol_type = other RNA
ctgctggcctccgcagtccccacc

SEQ ID NO: 309 - RNA, 26 nt, synthetic construct
  misc_feature 1..26: note = Description of Artificial Sequence: Synthetic oligonucleotide
  source 1..26: mol_type = other RNA
cactgctggcctccgcagtccccacc

SEQ ID NO: 310 - RNA, 28 nt, synthetic construct
  misc_feature 1..28: note = Description of Artificial Sequence: Synthetic oligonucleotide
  source 1..28: mol_type = other RNA
ttcactgctggcctccgcagtccccacc

SEQ ID NO: 311 - RNA, 30 nt, synthetic construct
  misc_feature 1..30: note = Description of Artificial Sequence: Synthetic oligonucleotide
  source 1..30: mol_type = other RNA
tgttcactgctggcctccgcagtccccacc

SEQ ID NO: 312 - RNA, 32 nt, synthetic construct
  misc_feature 1..32: note = Description of Artificial Sequence: Synthetic oligonucleotide
  source 1..32: mol_type = other RNA
ggtgttcactgctggcctccgcagtccccacc

SEQ ID NO: 313 - RNA, 33 nt, synthetic construct
  misc_feature 1..33: note = Description of Artificial Sequence: Synthetic oligonucleotide
  source 1..33: mol_type = other RNA
gggtgttcactgctggcctccgcagtccccacc

SEQ ID NO: 314 - RNA, 34 nt, synthetic construct
  misc_feature 1..34: note = Description of Artificial Sequence: Synthetic oligonucleotide
  source 1..34: mol_type = other RNA
ggggtgttcactgctggcctccgcagtccccacc

SEQ ID NO: 315 - RNA, 35 nt, synthetic construct
  misc_feature 1..35: note = Description of Artificial Sequence: Synthetic oligonucleotide
  source 1..35: mol_type = other RNA
aggggtgttcactgctggcctccgcagtccccacc

SEQ ID NO: 316 - RNA, 36 nt, synthetic construct
  misc_feature 1..36: note = Description of Artificial Sequence: Synthetic oligonucleotide
  source 1..36: mol_type = other RNA
aaggggtgttcactgctggcctccgcagtccccacc

SEQ ID NO: 317 - RNA, 38 nt, synthetic construct
  misc_feature 1..38: note = Description of Artificial Sequence: Synthetic oligonucleotide
  source 1..38: mol_type = other RNA
ccaaggggtgttcactgctggcctccgcagtccccacc

SEQ ID NO: 318 - RNA, 40 nt, synthetic construct
  misc_feature 1..40: note = Description of Artificial Sequence: Synthetic oligonucleotide
  source 1..40: mol_type = other RNA
gcccaaggggtgttcactgctggcctccgcagtccccacc

SEQ ID NO: 319 - RNA, 42 nt, synthetic construct
  misc_feature 1..42: note = Description of Artificial Sequence: Synthetic oligonucleotide
  source 1..42: mol_type = other RNA
acgcccaaggggtgttcactgctggcctccgcagtccccacc

SEQ ID NO: 320 - RNA, 44 nt, synthetic construct
  misc_feature 1..44: note = Description of Artificial Sequence: Synthetic oligonucleotide
  source 1..44: mol_type = other RNA
ccacgcccaaggggtgttcactgctggcctccgcagtccccacc

SEQ ID NO: 321 - RNA, 46 nt, synthetic construct
  misc_feature 1..46: note = Description of Artificial Sequence: Synthetic oligonucleotide
  source 1..46: mol_type = other RNA
tgccacgcccaaggggtgttcactgctggcctccgcagtccccacc

SEQ ID NO: 322 - RNA, 48 nt, synthetic construct
  misc_feature 1..48: note = Description of Artificial Sequence: Synthetic oligonucleotide
  source 1..48: mol_type = other RNA
actgccacgcccaaggggtgttcactgctggcctccgcagtccccacc

SEQ ID NO: 323 - RNA, 50 nt, synthetic construct
  misc_feature 1..50: note = Description of Artificial Sequence: Synthetic oligonucleotide
  source 1..50: mol_type = other RNA
tgactgccacgcccaaggggtgttcactgctggcctccgcagtccccacc

SEQ ID NO: 324 - RNA, 52 nt, synthetic construct
  misc_feature 1..52: note = Description of Artificial Sequence: Synthetic oligonucleotide
  source 1..52: mol_type = other RNA
ggtgactgccacgcccaaggggtgttcactgctggcctccgcagtccccacc

SEQ ID NO: 325 - RNA, 54 nt, synthetic construct
  misc_feature 1..54: note = Description of Artificial Sequence: Synthetic oligonucleotide
  source 1..54: mol_type = other RNA
ttggtgactgccacgcccaaggggtgttcactgctggcctccgcagtccccacc

SEQ ID NO: 326 - RNA, 56 nt, synthetic construct
  misc_feature 1..56: note = Description of Artificial Sequence: Synthetic oligonucleotide
  source 1..56: mol_type = other RNA
atttggtgactgccacgcccaaggggtgttcactgctggcctccgcagtccccacc

SEQ ID NO: 327 - RNA, 58 nt, synthetic construct
  misc_feature 1..58: note = Description of Artificial Sequence: Synthetic oligonucleotide
  source 1..58: mol_type = other RNA
gtatttggtgactgccacgcccaaggggtgttcactgctggcctccgcagtccccacc

SEQ ID NO: 328 - RNA, 60 nt, synthetic construct
  misc_feature 1..60: note = Description of Artificial Sequence: Synthetic oligonucleotide
  source 1..60: mol_type = other RNA
cagtatttggtgactgccacgcccaaggggtgttcactgctggcctccgcagtccccacc

SEQ ID NO: 329 - RNA, 62 nt, synthetic construct
  misc_feature 1..62: note = Description of Artificial Sequence: Synthetic oligonucleotide
  source 1..62: mol_type = other RNA
tacagtatttggtgactgccacgcccaaggggtgttcactgctggcctccgcagtccccacc

SEQ ID NO: 330 - RNA, 64 nt, synthetic construct
  misc_feature 1..64: note = Description of Artificial Sequence: Synthetic oligonucleotide
  source 1..64: mol_type = other RNA
tttacagtatttggtgactgccacgcccaaggggtgttcactgctggcctccgcagtccccacc

SEQ ID NO: 331 - RNA, 66 nt, synthetic construct
  misc_feature 1..66: note = Description of Artificial Sequence: Synthetic oligonucleotide
  source 1..66: mol_type = other RNA
tctttacagtatttggtgactgccacgcccaaggggtgttcactgctggcctccgcagtccccacc

SEQ ID NO: 332 - RNA, 68 nt, synthetic construct
  misc_feature 1..68: note = Description of Artificial Sequence: Synthetic oligonucleotide
  source 1..68: mol_type = other RNA
cctctttacagtatttggtgactgccacgcccaaggggtgttcactgctggcctccgcagtccccacc

SEQ ID NO: 333 - RNA, 70 nt, synthetic construct
  misc_feature 1..70: note = Description of Artificial Sequence: Synthetic oligonucleotide
  source 1..70: mol_type = other RNA
tacctctttacagtatttggtgactgccacgcccaaggggtgttcactgctggcctccgcagtccccacc

SEQ ID NO: 334 - RNA, 72 nt, synthetic construct
  misc_feature 1..72: note = Description of Artificial Sequence: Synthetic oligonucleotide
  source 1..72: mol_type = other RNA
cgtacctctttacagtatttggtgactgccacgcccaaggggtgttcactgctggcctccgcagtccccacc

SEQ ID NO: 335 - RNA, 74 nt, synthetic construct
  misc_feature 1..74: note = Description of Artificial Sequence: Synthetic oligonucleotide
  source 1..74: mol_type = other RNA
cacgtacctctttacagtatttggtgactgccacgcccaaggggtgttcactgctggcctccgcagtccccacc

SEQ ID NO: 336 - RNA, 76 nt, synthetic construct
  misc_feature 1..76: note = Description of Artificial Sequence: Synthetic oligonucleotide
  source 1..76: mol_type = other RNA
tccacgtacctctttacagtatttggtgactgccacgcccaaggggtgttcactgctggcctccgcagtccccacc

SEQ ID NO: 337 - RNA, 20 nt, synthetic construct
  misc_feature 1..20: note = Description of Artificial Sequence: Synthetic oligonucleotide
  source 1..20: mol_type = other RNA
aataaaagagcattggcggg

SEQ ID NO: 338 - RNA, 124 nt, synthetic construct
  misc_feature 1..124: note = Description of Artificial Sequence: Synthetic polynucleotide
  source 1..124: mol_type = other RNA
aggaaggttctggctgtggtgttttagagctagaaatagcaagttaaaataaggctagtccgttatcaacttgaaaaagtggcaccgagtcggtgctggcctccgcagtccccaccacagccag

SEQ ID NO: 339 - RNA, 126 nt, synthetic construct
  misc_feature 1..126: note = Description of Artificial Sequence: Synthetic polynucleotide
  source 1..126: mol_type = other RNA
aggaaggttctggctgtggtgttttagagctagaaatagcaagttaaaataaggctagtccgttatcaacttgaaaaagtggcaccgagtcggtgcgctggcctccgcagtccccaccacagccag

SEQ ID NO: 340 - RNA, 128 nt, synthetic construct
  misc_feature 1..128: note = Description of Artificial Sequence: Synthetic polynucleotide
  source 1..128: mol_type = other RNA
aggaaggttctggctgtggtgttttagagctagaaatagcaagttaaaataaggctagtccgttatcaacttgaaaaagtggcaccgagtcggtgctggcctccgcagtccccaccacagccagaacc

SEQ ID NO: 341 - RNA, 128 nt, synthetic construct
  misc_feature 1..128: note = Description of Artificial Sequence: Synthetic polynucleotide
  source 1..128: mol_type = other RNA
aggaaggttctggctgtggtgttttagagctagaaatagcaagttaaaataaggctagtccgttatcaacttgaaaaagtggcaccgagtcggtgcctgctggcctccgcagtccccaccacagccag

SEQ ID NO: 342 - RNA, 130 nt, synthetic construct
  misc_feature 1..130: note = Description of Artificial Sequence: Synthetic polynucleotide
  source 1..130: mol_type = other RNA
aggaaggttctggctgtggtgttttagagctagaaatagcaagttaaaataaggctagtccgttatcaacttgaaaaagtggcaccgagtcggtgcgctggcctccgcagtccccaccacagccagaacc

SEQ ID NO: 343 - RNA, 130 nt, synthetic construct
  misc_feature 1..130: note = Description of Artificial Sequence: Synthetic polynucleotide
  source 1..130: mol_type = other RNA
aggaaggttctggctgtggtgttttagagctagaaatagcaagttaaaataaggctagtccgttatcaacttgaaaaagtggcaccgagtcggtgccactgctggcctccgcagtccccaccacagccag

SEQ ID NO: 344 - RNA, 132 nt, synthetic construct
  misc_feature 1..132: note = Description of Artificial Sequence: Synthetic polynucleotide
  source 1..132: mol_type = other RNA
aggaaggttctggctgtggtgttttagagctagaaatagcaagttaaaataaggctagtccgttatcaacttgaaaaagtggcaccgagtcggtgcttcactgctggcctccgcagtccccaccacagccag

SEQ ID NO: 345 - RNA, 132 nt, synthetic construct
  misc_feature 1..132: note = Description of Artificial Sequence: Synthetic polynucleotide
  source 1..132: mol_type = other RNA
aggaaggttctggctgtggtgttttagagctagaaatagcaagttaaaataaggctagtccgttatcaacttgaaaaagtggcaccgagtcggtgcctgctggcctccgcagtccccaccacagccagaacc

SEQ ID NO: 346 - RNA, 134 nt, synthetic construct
  misc_feature 1..134: note = Description of Artificial Sequence: Synthetic polynucleotide
  source 1..134: mol_type = other RNA
aggaaggttctggctgtggtgttttagagctagaaatagcaagttaaaataaggctagtccgttatcaacttgaaaaagtggcaccgagtcggtgctgttcactgctggcctccgcagtccccaccacagccag

SEQ ID NO: 347 - RNA, 134 nt, synthetic construct
  misc_feature 1..134: note = Description of Artificial Sequence: Synthetic polynucleotide
  source 1..134: mol_type = other RNA
aggaaggttctggctgtggtgttttagagctagaaatagcaagttaaaataaggctagtccgttatcaacttgaaaaagtggcaccgagtcggtgccactgctggcctccgcagtccccaccacagccagaacc

SEQ ID NO: 348 - RNA, 135 nt, synthetic construct
  misc_feature 1..135: note = Description of Artificial Sequence: Synthetic polynucleotide
  source 1..135: mol_type = other RNA
aggaaggttctggctgtggtgttttagagctagaaatagcaagttaaaataaggctagtccgttatcaacttgaaaaagtggcaccgagtcggtgcggtgttcactgctggcctccgcagtccccaccacagcca

SEQ ID NO: 349 - RNA, 136 nt, synthetic construct
  misc_feature 1..136: note = Description of Artificial Sequence: Synthetic polynucleotide
  source 1..136: mol_type = other RNA
aggaaggttctggctgtggtgttttagagctagaaatagcaagttaaaataaggctagtccgttatcaacttgaaaaagtggcaccgagtcggtgcggtgttcactgctggcctccgcagtccccaccacagccag

SEQ ID NO: 350 - RNA, 136 nt, synthetic construct
  misc_feature 1..136: note = Description of Artificial Sequence: Synthetic polynucleotide
  source 1..136: mol_type = other RNA
aggaaggttctggctgtggtgttttagagctagaaatagcaagttaaaataaggctagtccgttatcaacttgaaaaagtggcaccgagtcggtgcttcactgctggcctccgcagtccccaccacagccagaacc

SEQ ID NO: 351 - RNA, 136 nt, synthetic construct
  misc_feature 1..136: note = Description of Artificial Sequence: Synthetic polynucleotide
  source 1..136: mol_type = other RNA
aggaaggttctggctgtggtgttttagagctagaaatagcaagttaaaataaggctagtccgttatcaacttgaaaaagtggcaccgagtcggtgcgggtgttcactgctggcctccgcagtccccaccacagcca

SEQ ID NO: 352 - RNA, 137 nt, synthetic construct
  misc_feature 1..137: note = Description of Artificial Sequence: Synthetic polynucleotide
  source 1..137: mol_type = other RNA
aggaaggttctggctgtggtgttttagagctagaaatagcaagttaaaataaggctagtccgttatcaacttgaaaaagtggcaccgagtcggtgcgggtgttcactgctggcctccgcagtccccaccacagccag

SEQ ID NO: 353 - RNA, 137 nt, synthetic construct
  misc_feature 1..137: note = Description of Artificial Sequence: Synthetic polynucleotide
  source 1..137: mol_type = other RNA
aggaaggttctggctgtggtgttttagagctagaaatagcaagttaaaataaggctagtccgttatcaacttgaaaaagtggcaccgagtcggtgcggtgttcactgctggcctccgcagtccccaccacagccaga

SEQ ID NO: 354 - RNA, 137 nt, synthetic construct
  misc_feature 1..137: note = Description of Artificial Sequence: Synthetic polynucleotide
  source 1..137: mol_type = other RNA
aggaaggttctggctgtggtgttttagagctagaaatagcaagttaaaataaggctagtccgttatcaacttgaaaaagtggcaccgagtcggtgcggggtgttcactgctggcctccgcagtccccaccacagcca

SEQ ID NO: 355 - RNA, 138 nt, synthetic construct
  misc_feature 1..138: note = Description of Artificial Sequence: Synthetic polynucleotide
  source 1..138: mol_type = other RNA
aggaaggttctggctgtggtgttttagagctagaaatagcaagttaaaataaggctagtccgttatcaacttgaaaaagtggcaccgagtcggtgcggtgttcactgctggcctccgcagtccccaccacagccagaa

SEQ ID NO: 356 - RNA, 138 nt, synthetic construct
  misc_feature 1..138: note = Description of Artificial Sequence: Synthetic polynucleotide
  source 1..138: mol_type = other RNA
aggaaggttctggctgtggtgttttagagctagaaatagcaagttaaaataaggctagtccgttatcaacttgaaaaagtggcaccgagtcggtgcggggtgttcactgctggcctccgcagtccccaccacagccag

SEQ ID NO: 357 - RNA, 138 nt, synthetic construct
  misc_feature 1..138: note = Description of Artificial Sequence: Synthetic polynucleotide
  source 1..138: mol_type = other RNA
aggaaggttctggctgtggtgttttagagctagaaatagcaagttaaaataaggctagtccgttatcaacttgaaaaagtggcaccgagtcggtgctgttcactgctggcctccgcagtccccaccacagccagaacc

SEQ ID NO: 358 - RNA, 138 nt, synthetic construct
  misc_feature 1..138: note = Description of Artificial Sequence: Synthetic polynucleotide
  source 1..138: mol_type = other RNA
aggaaggttctggctgtggtgttttagagctagaaatagcaagttaaaataaggctagtccgttatcaacttgaaaaagtggcaccgagtcggtgcaggggtgttcactgctggcctccgcagtccccaccacagcca

SEQ ID NO: 359 - RNA, 138 nt, synthetic construct
  misc_feature 1..138: note = Description of Artificial Sequence: Synthetic polynucleotide
  source 1..138: mol_type = other RNA
aggaaggttctggctgtggtgttttagagctagaaatagcaagttaaaataaggctagtccgttatcaacttgaaaaagtggcaccgagtcggtgcgggtgttcactgctggcctccgcagtccccaccacagccaga

SEQ ID NO: 360 - RNA, 139 nt, synthetic construct
  misc_feature 1..139: note = Description of Artificial Sequence: Synthetic polynucleotide
  source 1..139: mol_type = other RNA
aggaaggttctggctgtggtgttttagagctagaaatagcaagttaaaataaggctagtccgttatcaacttgaaaaagtggcaccgagtcggtgcggtgttcactgctggcctccgcagtccccaccacagccagaac

SEQ ID NO: 361 - RNA, 139 nt, synthetic construct
  misc_feature 1..139: note = Description of Artificial Sequence: Synthetic polynucleotide
  source 1..139: mol_type = other RNA
aggaaggttctggctgtggtgttttagagctagaaatagcaagttaaaataaggctagtccgttatcaacttgaaaaagtggcaccgagtcggtgcaggggtgttcactgctggcctccgcagtccccaccacagccag

SEQ ID NO: 362 - RNA, 139 nt, synthetic construct
  misc_feature 1..139: note = Description of Artificial Sequence: Synthetic polynucleotide
  source 1..139: mol_type = other RNA
aggaaggttctggctgtggtgttttagagctagaaatagcaagttaaaataaggctagtccgttatcaacttgaaaaagtggcaccgagtcggtgcggggtgttcactgctggcctccgcagtccccaccacagccaga

SEQ ID NO: 363 - RNA, 139 nt, synthetic construct
  misc_feature 1..139: note = Description of Artificial Sequence: Synthetic polynucleotide
  source 1..139: mol_type = other RNA
aggaaggttctggctgtggtgttttagagctagaaatagcaagttaaaataaggctagtccgttatcaacttgaaaaagtggcaccgagtcggtgcaaggggtgttcactgctggcctccgcagtccccaccacagcca

SEQ ID NO: 364 - RNA, 139 nt, synthetic construct
  misc_feature 1..139: note = Description of Artificial Sequence: Synthetic polynucleotide
  source 1..139: mol_type = other RNA
aggaaggttctggctgtggtgttttagagctagaaatagcaagttaaaataaggctagtccgttatcaacttgaaaaagtggcaccgagtcggtgcgggtgttcactgctggcctccgcagtccccaccacagccagaa

SEQ ID NO: 365 - RNA, 140 nt, synthetic construct
  misc_feature 1..140: note = Description of Artificial Sequence: Synthetic polynucleotide
  source 1..140: mol_type = other RNA
aggaaggttctggctgtggtgttttagagctagaaatagcaagttaaaataaggctagtccgttatcaacttgaaaaagtggcaccgagtcggtgcaaggggtgttcactgctggcctccgcagtccccaccacagccag

SEQ ID NO: 366 - RNA, 140 nt, synthetic construct
  misc_feature 1..140: note = Description of Artificial Sequence: Synthetic polynucleotide
  source 1..140: mol_type = other RNA
aggaaggttctggctgtggtgttttagagctagaaatagcaagttaaaataaggctagtccgttatcaacttgaaaaagtggcaccgagtcggtgcggtgttcactgctggcctccgcagtccccaccacagccagaacc

SEQ ID NO: 367 - RNA, 140 nt, synthetic construct
  misc_feature 1..140: note = Description of Artificial Sequence: Synthetic polynucleotide
  source 1..140: mol_type = other RNA
aggaaggttctggctgtggtgttttagagctagaaatagcaagttaaaataaggctagtccgttatcaacttgaaaaagtggcaccgagtcggtgcaggggtgttcactgctggcctccgcagtccccaccacagccaga

SEQ ID NO: 368 - RNA, 140 nt, synthetic construct
  misc_feature 1..140: note = Description of Artificial Sequence: Synthetic polynucleotide
  source 1..140: mol_type = other RNA
aggaaggttctggctgtggtgttttagagctagaaatagcaagttaaaataaggctagtccgttatcaacttgaaaaagtggcaccgagtcggtgcggggtgttcactgctggcctccgcagtccccaccacagccagaa

SEQ ID NO: 369 - RNA, 140 nt, synthetic construct
  misc_feature 1..140: note = Description of Artificial Sequence: Synthetic polynucleotide
  source 1..140: mol_type = other RNA
aggaaggttctggctgtggtgttttagagctagaaatagcaagttaaaataaggctagtccgttatcaacttgaaaaagtggcaccgagtcggtgcgggtgttcactgctggcctccgcagtccccaccacagccagaac

SEQ ID NO: 370 - RNA, 141 nt, synthetic construct
  misc_feature 1..141: note = Description of Artificial Sequence: Synthetic polynucleotide
  source 1..141: mol_type = other RNA
aggaaggttctggctgtggtgttttagagctagaaatagcaagttaaaataaggctagtccgttatcaacttgaaaaagtggcaccgagtcggtgcggtgttcactgctggcctccgcagtccccaccacagccagaacct

SEQ ID NO: 371 - RNA, 141 nt, synthetic construct
  misc_feature 1..141: note = Description of Artificial Sequence: Synthetic polynucleotide
  source 1..141: mol_type = other RNA
aggaaggttctggctgtggtgttttagagctagaaatagcaagttaaaataaggctagtccgttatcaacttgaaaaagtggcaccgagtcggtgcaaggggtgttcactgctggcctccgcagtccccaccacagccaga

SEQ ID NO: 372 - RNA, 141 nt, synthetic construct
  misc_feature 1..141: note = Description of Artificial Sequence: Synthetic polynucleotide
  source 1..141: mol_type = other RNA
aggaaggttctggctgtggtgttttagagctagaaatagcaagttaaaataaggctagtccgttatcaacttgaaaaagtggcaccgagtcggtgcggggtgttcactgctggcctccgcagtccccaccacagccagaac

SEQ ID NO: 373 - RNA, 141 nt, synthetic construct
  misc_feature 1..141: note = Description of Artificial Sequence: Synthetic polynucleotide
  source 1..141: mol_type = other RNA
aggaaggttctggctgtggtgttttagagctagaaatagcaagttaaaataaggctagtccgttatcaacttgaaaaagtggcaccgagtcggtgcaggggtgttcactgctggcctccgcagtccccaccacagccagaa

SEQ ID NO: 374 - RNA, 141 nt, synthetic construct
  misc_feature 1..141: note = Description of Artificial Sequence: Synthetic polynucleotide
  source 1..141: mol_type = other RNA
aggaaggttctggctgtggtgttttagagctagaaatagcaagttaaaataaggctagtccgttatcaacttgaaaaagtggcaccgagtcggtgcgggtgttcactgctggcctccgcagtccccaccacagccagaacc

SEQ ID NO: 375 - RNA, 142 nt, synthetic construct
  misc_feature 1..142: note = Description of Artificial Sequence: Synthetic polynucleotide
  source 1..142: mol_type = other RNA
aggaaggttctggctgtggtgttttagagctagaaatagcaagttaaaataaggctagtccgttatcaacttgaaaaagtggcaccgagtcggtgcggggtgttcactgctggcctccgcagtccccaccacagccagaacc

SEQ ID NO: 376 - RNA, 142 nt, synthetic construct
  misc_feature 1..142: note = Description of Artificial Sequence: Synthetic polynucleotide
  source 1..142: mol_type = other RNA
aggaaggttctggctgtggtgttttagagctagaaatagcaagttaaaataaggctagtccgttatcaacttgaaaaagtggcaccgagtcggtgcgggtgttcactgctggcctccgcagtccccaccacagccagaacct

SEQ ID NO: 377 - RNA, 142 nt, synthetic construct
  misc_feature 1..142: note = Description of Artificial Sequence: Synthetic polynucleotide
  source 1..142: mol_type = other RNA
aggaaggttctggctgtggtgttttagagctagaaatagcaagttaaaataaggctagtccgttatcaacttgaaaaagtggcaccgagtcggtgcaaggggtgttcactgctggcctccgcagtccccaccacagccagaa

SEQ ID NO: 378 - RNA, 142 nt, synthetic construct
  misc_feature 1..142: note = Description of Artificial Sequence: Synthetic polynucleotide
  source 1..142: mol_type = other RNA
aggaaggttctggctgtggtgttttagagctagaaatagcaagttaaaataaggctagtccgttatcaacttgaaaaagtggcaccgagtcggtgcaggggtgttcactgctggcctccgcagtccccaccacagccagaac

SEQ ID NO: 379 - RNA, 142 nt, synthetic construct
  misc_feature 1..142: note = Description of Artificial Sequence: Synthetic polynucleotide
  source 1..142: mol_type = other RNA
aggaaggttctggctgtggtgttttagagctagaaatagcaagttaaaataaggctagtccgttatcaacttgaaaaagtggcaccgagtcggtgcggtgttcactgctggcctccgcagtccccaccacagccagaacctt

SEQ ID NO: 380 - RNA, 142 nt, synthetic construct
  misc_feature 1..142: note = Description of Artificial Sequence: Synthetic polynucleotide
  source 1..142: mol_type = other RNA
aggaaggttctggctgtggtgttttagagctagaaatagcaagttaaaataaggctagtccgttatcaacttgaaaaagtggcaccgagtcggtgcccaaggggtgttcactgctggcctccgcagtccccaccacagccag

SEQ ID NO: 381 - RNA, 143 nt, synthetic construct
  misc_feature 1..143: note = Description of Artificial Sequence: Synthetic polynucleotide
  source 1..143: mol_type = other RNA
aggaaggttctggctgtggtgttttagagctagaaatagcaagttaaaataaggctagtccgttatcaacttgaaaaagtggcaccgagtcggtgcgggtgttcactgctggcctccgcagtccccaccacagccagaacctt

SEQ ID NO: 382 - RNA, 143 nt, synthetic construct
  misc_feature 1..143: note = Description of Artificial Sequence: Synthetic polynucleotide
  source 1..143: mol_type = other RNA
aggaaggttctggctgtggtgttttagagctagaaatagcaagttaaaataaggctagtccgttatcaacttgaaaaagtggcaccgagtcggtgcaaggggtgttcactgctggcctccgcagtccccaccacagccagaac

SEQ ID NO: 383 - RNA, 143 nt, synthetic construct
  misc_feature 1..143: note = Description of Artificial Sequence: Synthetic polynucleotide
  source 1..143: mol_type = other RNA
aggaaggttctggctgtggtgttttagagctagaaatagcaagttaaaataaggctagtccgttatcaacttgaaaaagtggcaccgagtcggtgcgcccaaggggtgttcactgctggcctccgcagtccccaccacagcca

SEQ ID NO: 384 - RNA, 143 nt, synthetic construct
  misc_feature 1..143: note = Description of Artificial Sequence: Synthetic polynucleotide
  source 1..143: mol_type = other RNA
aggaaggttctggctgtggtgttttagagctagaaatagcaagttaaaataaggctagtccgttatcaacttgaaaaagtggcaccgagtcggtgcggggtgttcactgctggcctccgcagtccccaccacagccagaacct

SEQ ID NO: 385 - RNA, 143 nt, synthetic construct
  misc_feature 1..143: note = Description of Artificial Sequence: Synthetic polynucleotide
  source 1..143: mol_type = other RNA
gaggaaggttctggctgtggtgttttagagctagaaatagcaagttaaaataaggctagtccgttatcaacttgaaaaagtggcaccgagtcggtgcggtgttcactgctggcctccgcagtccccaccacagccattttttt

SEQ ID NO: 386 - RNA, 143 nt, synthetic construct
  misc_feature 1..143: note = Description of Artificial Sequence: Synthetic polynucleotide
  source 1..143: mol_type = other RNA
aggaaggttctggctgtggtgttttagagctagaaatagcaagttaaaataaggctagtccgttatcaacttgaaaaagtggcaccgagtcggtgcaggggtgttcactgctggcctccgcagtccccaccacagccagaacc

SEQ ID NO: 387 - RNA, 144 nt, synthetic construct
  misc_feature 1..144: note = Description of Artificial Sequence: Synthetic polynucleotide
  source 1..144: mol_type = other RNA
gaggaaggttctggctgtggtgttttagagctagaaatagcaagttaaaataaggctagtccgttatcaacttgaaaaagtggcaccgagtcggtgcgggtgttcactgctggcctccgcagtccccaccacagccattttttt

SEQ ID NO: 388 - RNA, 144 nt, synthetic construct
  misc_feature 1..144: note = Description of Artificial Sequence: Synthetic polynucleotide
  source 1..144: mol_type = other RNA
gaggaaggttctggctgtggtgttttagagctagaaatagcaagttaaaataaggctagtccgttatcaacttgaaaaagtggcaccgagtcggtgcggtgttcactgctggcctccgcagtccccaccacagccagttttttt

SEQ ID NO: 389 - RNA, 144 nt, synthetic construct
  misc_feature 1..144: note = Description of Artificial Sequence: Synthetic polynucleotide
  source 1..144: mol_type = other RNA
aggaaggttctggctgtggtgttttagagctagaaatagcaagttaaaataaggctagtccgttatcaacttgaaaaagtggcaccgagtcggtgcaaggggtgttcactgctggcctccgcagtccccaccacagccagaacc

SEQ ID NO: 390 - RNA, 144 nt, synthetic construct
  misc_feature 1..144: note = Description of Artificial Sequence: Synthetic polynucleotide
  source 1..144: mol_type = other RNA
aggaaggttctggctgtggtgttttagagctagaaatagcaagttaaaataaggctagtccgttatcaacttgaaaaagtggcaccgagtcggtgcgcccaaggggtgttcactgctggcctccgcagtccccaccacagccag

SEQ ID NO: 391 - RNA, 144 nt, synthetic construct
  misc_feature 1..144: note = Description of Artificial Sequence: Synthetic polynucleotide
  source 1..144: mol_type = other RNA
aggaaggttctggctgtggtgttttagagctagaaatagcaagttaaaataaggctagtccgttatcaacttgaaaaagtggcaccgagtcggtgcggggtgttcactgctggcctccgcagtccccaccacagccagaacctt

SEQ ID NO: 392 - RNA, 144 nt, synthetic construct
  misc_feature 1..144: note = Description of Artificial Sequence: Synthetic polynucleotide
  source 1..144: mol_type = other RNA
aggaaggttctggctgtggtgttttagagctagaaatagcaagttaaaataaggctagtccgttatcaacttgaaaaagtggcaccgagtcggtgcaggggtgttcactgctggcctccgcagtccccaccacagccagaacct

SEQ ID NO: 393 - RNA, 145 nt, synthetic construct
  misc_feature 1..145: note = Description of Artificial Sequence: Synthetic polynucleotide
  source 1..145: mol_type = other RNA
gaggaaggttctggctgtggtgttttagagctagaaatagcaagttaaaataaggctagtccgttatcaacttgaaaaagtggcaccgagtcggtgcggggtgttcactgctggcctccgcagtccccaccacagccattttttt

SEQ ID NO: 394 - RNA, 145 nt, synthetic construct
  misc_feature 1..145: note = Description of Artificial Sequence: Synthetic polynucleotide
  source 1..145: mol_type = other RNA
aggaaggttctggctgtggtgttttagagctagaaatagcaagttaaaataaggctagtccgttatcaacttgaaaaagtggcaccgagtcggtgcaaggggtgttcactgctggcctccgcagtccccaccacagccagaacct

SEQ ID NO: 395 - RNA, 145 nt, synthetic construct
  misc_feature 1..145: note = Description of Artificial Sequence: Synthetic polynucleotide
  source 1..145: mol_type = other RNA
gaggaaggttctggctgtggtgttttagagctagaaatagcaagttaaaataaggctagtccgttatcaacttgaaaaagtggcaccgagtcggtgcggtgttcactgctggcctccgcagtccccaccacagccagattttttt

SEQ ID NO: 396 - RNA, 145 nt, synthetic construct
  misc_feature 1..145: note = Description of Artificial Sequence: Synthetic polynucleotide
  source 1..145: mol_type = other RNA
gaggaaggttctggctgtggtgttttagagctagaaatagcaagttaaaataaggctagtccgttatcaacttgaaaaagtggcaccgagtcggtgcgggtgttcactgctggcctccgcagtccccaccacagccagttttttt

SEQ ID NO: 397 - RNA, 145 nt, synthetic construct
  misc_feature 1..145: note = Description of Artificial Sequence: Synthetic polynucleotide
  source 1..145: mol_type = other RNA
aggaaggttctggctgtggtgttttagagctagaaatagcaagttaaaataaggctagtccgttatcaacttgaaaaagtggcaccgagtcggtgcaggggtgttcactgctggcctccgcagtccccaccacagccagaacctt

SEQ ID NO: 398 - RNA, 145 nt, synthetic construct
  misc_feature 1..145: note = Description of Artificial Sequence: Synthetic polynucleotide
  source 1..145: mol_type = other RNA
aggaaggttctggctgtggtgttttagagctagaaatagcaagttaaaataaggctagtccgttatcaacttgaaaaagtggcaccgagtcggtgcgcccaaggggtgttcactgctggcctccgcagtccccaccacagccaga

SEQ ID NO: 399 - RNA, 146 nt, synthetic construct
  misc_feature 1..146: note = Description of Artificial Sequence: Synthetic polynucleotide
  source 1..146: mol_type = other RNA
gaggaaggttctggctgtggtgttttagagctagaaatagcaagttaaaataaggctagtccgttatcaacttgaaaaagtggcaccgagtcggtgcgggtgttcactgctggcctccgcagtccccaccacagccagattttttt

SEQ ID NO: 400 - RNA, 146 nt, synthetic construct
  misc_feature 1..146: note = Description of Artificial Sequence: Synthetic polynucleotide
  source 1..146: mol_type = other RNA
aggaaggttctggctgtggtgttttagagctagaaatagcaagttaaaataaggctagtccgttatcaacttgaaaaagtggcaccgagtcggtgcgcccaaggggtgttcactgctggcctccgcagtccccaccacagccagaa

SEQ ID NO: 401 - RNA, 146 nt, synthetic construct
  misc_feature 1..146: note = Description of Artificial Sequence: Synthetic polynucleotide
  source 1..146: mol_type = other RNA
aggaaggttctggctgtggtgttttagagctagaaatagcaagttaaaataaggctagtccgttatcaacttgaaaaagtggcaccgagtcggtgcccaaggggtgttcactgctggcctccgcagtccccaccacagccagaacc

SEQ ID NO: 402 - RNA, 146 nt, synthetic construct
  misc_feature 1..146: note = Description of Artificial Sequence: Synthetic polynucleotide
  source 1..146: mol_type = other RNA
gaggaaggttctggctgtggtgttttagagctagaaatagcaagttaaaataaggctagtccgttatcaacttgaaaaagtggcaccgagtcggtgcggtgttcactgctggcctccgcagtccccaccacagccagaattttttt

SEQ ID NO: 403 - RNA, 146 nt, synthetic construct
  misc_feature 1..146: note = Description of Artificial Sequence: Synthetic polynucleotide
  source 1..146: mol_type = other RNA
gaggaaggttctggctgtggtgttttagagctagaaatagcaagttaaaataaggctagtccgttatcaacttgaaaaagtggcaccgagtcggtgcggggtgttcactgctggcctccgcagtccccaccacagccagttttttt

SEQ ID NO: 404 - RNA, 146 nt, synthetic construct
  misc_feature 1..146: note = Description of Artificial Sequence: Synthetic polynucleotide
  source 1..146: mol_type = other RNA
aggaaggttctggctgtggtgttttagagctagaaatagcaagttaaaataaggctagtccgttatcaacttgaaaaagtggcaccgagtcggtgcaaggggtgttcactgctggcctccgcagtccccaccacagccagaacctt

SEQ ID NO: 405 - RNA, 146 nt, synthetic construct
  misc_feature 1..146: note = Description of Artificial Sequence: Synthetic polynucleotide
  source 1..146: mol_type = other RNA
gaggaaggttctggctgtggtgttttagagctagaaatagcaagttaaaataaggctagtccgttatcaacttgaaaaagtggcaccgagtcggtgcaggggtgttcactgctggcctccgcagtccccaccacagccattttttt

SEQ ID NO: 406 - RNA, 146 nt, synthetic construct
  misc_feature 1..146: note = Description of Artificial Sequence: Synthetic polynucleotide
  source 1..146: mol_type = other RNA
aggaaggttctggctgtggtgttttagagctagaaatagcaagttaaaataaggctagtccgttatcaacttgaaaaagtggcaccgagtcggtgcacgcccaaggggtgttcactgctggcctccgcagtccccaccacagccag

SEQ ID NO: 407 - RNA, 147 nt, synthetic construct
  misc_feature 1..147: note = Description of Artificial Sequence: Synthetic polynucleotide
  source 1..147: mol_type = other RNA
gaggaaggttctggctgtggtgttttagagctagaaatagcaagttaaaataaggctagtccgttatcaacttgaaaaagtggcaccgagtcggtgcggggtgttcactgctggcctccgcagtccccaccacagccagattttttt

SEQ ID NO: 408 - RNA, 147 nt, synthetic construct
  misc_feature 1..147: note = Description of Artificial Sequence: Synthetic polynucleotide
  source 1..147: mol_type = other RNA
aggaaggttctggctgtggtgttttagagctagaaatagcaagttaaaataaggctagtccgttatcaacttgaaaaagtggcaccgagtcggtgcgcccaaggggtgttcactgctggcctccgcagtccccaccacagccagaac

SEQ ID NO: 409 - RNA, 147 nt, synthetic construct
  misc_feature 1..147: note = Description of Artificial Sequence: Synthetic polynucleotide
  source 1..147: mol_type = other RNA
gaggaaggttctggctgtggtgttttagagctagaaatagcaagttaaaataaggctagtccgttatcaacttgaaaaagtggcaccgagtcggtgcaaggggtgttcactgctggcctccgcagtccccaccacagccattttttt

SEQ ID NO: 410 - RNA, 147 nt, synthetic construct
  misc_feature 1..147: note = Description of Artificial Sequence: Synthetic polynucleotide
  source 1..147: mol_type = other RNA
gaggaaggttctggctgtggtgttttagagctagaaatagcaagttaaaataaggctagtccgttatcaacttgaaaaagtggcaccgagtcggtgcggtgttcactgctggcctccgcagtccccaccacagccagaacttttttt

SEQ ID NO: 411 - RNA, 147 nt, synthetic construct
  misc_feature 1..147: note = Description of Artificial Sequence: Synthetic polynucleotide
  source 1..147: mol_type = other RNA
gaggaaggttctggctgtggtgttttagagctagaaatagcaagttaaaataaggctagtccgttatcaacttgaaaaagtggcaccgagtcggtgcaggggtgttcactgctggcctccgcagtccccaccacagccagttttttt

SEQ ID NO: 412 - RNA, 147 nt, synthetic construct
  misc_feature 1..147: note = Description of Artificial Sequence: Synthetic polynucleotide
  source 1..147: mol_type = other RNA
gaggaaggttctggctgtggtgttttagagctagaaatagcaagttaaaataaggctagtccgttatcaacttgaaaaagtggcaccgagtcggtgcgggtgttcactgctggcctccgcagtccccaccacagccagaattttttt

SEQ ID NO: 413 - RNA, 148 nt, synthetic construct
  misc_feature 1..148: note = Description of Artificial Sequence: Synthetic polynucleotide
  source 1..148: mol_type = other RNA
gaggaaggttctggctgtggtgttttagagctagaaatagcaagttaaaataaggctagtccgttatcaacttgaaaaagtggcaccgagtcggtgcaaggggtgttcactgctggcctccgcagtccccaccacagccagttttttt

SEQ ID NO: 414 - RNA, 148 nt, synthetic construct
  misc_feature 1..148: note = Description of Artificial Sequence: Synthetic polynucleotide
  source 1..148: mol_type = other RNA
gaggaaggttctggctgtggtgttttagagctagaaatagcaagttaaaataaggctagtccgttatcaacttgaaaaagtggcaccgagtcggtgcgggtgttcactgctggcctccgcagtccccaccacagccagaacttttttt

SEQ ID NO: 415 - RNA, 148 nt, synthetic construct
  misc_feature 1..148: note = Description of Artificial Sequence: Synthetic polynucleotide
  source 1..148: mol_type = other RNA
aggaaggttctggctgtggtgttttagagctagaaatagcaagttaaaataaggctagtccgttatcaacttgaaaaagtggcaccgagtcggtgcccacgcccaaggggtgttcactgctggcctccgcagtccccaccacagccag

SEQ ID NO: 416 - RNA, 148 nt, synthetic construct
  misc_feature 1..148: note = Description of Artificial Sequence: Synthetic polynucleotide
  source 1..148: mol_type = other RNA
gaggaaggttctggctgtggtgttttagagctagaaatagcaagttaaaataaggctagtccgttatcaacttgaaaaagtggcaccgagtcggtgcggggtgttcactgctggcctccgcagtccccaccacagccagaattttttt

SEQ ID NO: 417 - RNA, 148 nt, synthetic construct
  misc_feature 1..148: note = Description of Artificial Sequence: Synthetic polynucleotide
  source 1..148: mol_type = other RNA
aggaaggttctggctgtggtgttttagagctagaaatagcaagttaaaataaggctagtccgttatcaacttgaaaaagtggcaccgagtcggtgcgcccaaggggtgttcactgctggcctccgcagtccccaccacagccagaacc

SEQ ID NO: 418 - RNA, 148 nt, synthetic construct
  misc_feature 1..148: note = Description of Artificial Sequence: Synthetic polynucleotide
  source 1..148: mol_type = other RNA
gaggaaggttctggctgtggtgttttagagctagaaatagcaagttaaaataaggctagtccgttatcaacttgaaaaagtggcaccgagtcggtgcaggggtgttcactgctggcctccgcagtccccaccacagccagattttttt

SEQ ID NO: 419 - RNA, 148 nt, synthetic construct
  misc_feature 1..148: note = Description of Artificial Sequence: Synthetic polynucleotide
  source 1..148: mol_type = other RNA
gaggaaggttctggctgtggtgttttagagctagaaatagcaagttaaaataaggctagtccgttatcaacttgaaaaagtggcaccgagtcggtgcggtgttcactgctggcctccgcagtccccaccacagccagaaccttttttt

SEQ ID NO: 420 - RNA, 149 nt, synthetic construct
  misc_feature 1..149: note = Description of Artificial Sequence: Synthetic polynucleotide
  source 1..149: mol_type = other RNA
gaggaaggttctggctgtggtgttttagagctagaaatagcaagttaaaataaggctagtccgttatcaacttgaaaaagtggcaccgagtcggtgcgggtgttcactgctggcctccgcagtccccaccacagccagaaccttttttt

SEQ ID NO: 421 - RNA, 149 nt, synthetic construct
  misc_feature 1..149: note = Description of Artificial Sequence: Synthetic polynucleotide
  source 1..149: mol_type = other RNA
gaggaaggttctggctgtggtgttttagagctagaaatagcaagttaaaataaggctagtccgttatcaacttgaaaaagtggcaccgagtcggtgcaaggggtgttcactgctggcctccgcagtccccaccacagccagattttttt

SEQ ID NO: 422 - RNA, 149 nt, synthetic construct
  misc_feature 1..149: note = Description of Artificial Sequence: Synthetic polynucleotide
  source 1..149: mol_type = other RNA
gaggaaggttctggctgtggtgttttagagctagaaatagcaagttaaaataaggctagtccgttatcaacttgaaaaagtggcaccgagtcggtgcggtgttcactgctggcctccgcagtccccaccacagccagaacctttttttt

SEQ ID NO: 423 - RNA, 149 nt, synthetic construct
  misc_feature 1..149: note = Description of Artificial Sequence: Synthetic polynucleotide
  source 1..149: mol_type = other RNA
gaggaaggttctggctgtggtgttttagagctagaaatagcaagttaaaataaggctagtccgttatcaacttgaaaaagtggcaccgagtcggtgcaggggtgttcactgctggcctccgcagtccccaccacagccagaattttttt

SEQ ID NO: 424 - RNA, 149 nt, synthetic construct
  misc_feature 1..149: note = Description of Artificial Sequence: Synthetic polynucleotide
  source 1..149: mol_type = other RNA
gaggaaggttctggctgtggtgttttagagctagaaatagcaagttaaaataaggctagtccgttatcaacttgaaaaagtggcaccgagtcggtgcggggtgttcactgctggcctccgcagtccccaccacagccagaacttttttt

SEQ ID NO: 425 - RNA, 149 nt, synthetic construct
  misc_feature 1..149: note = Description of Artificial Sequence: Synthetic polynucleotide
  source 1..149: mol_type = other RNA
aggaaggttctggctgtggtgttttagagctagaaatagcaagttaaaataaggctagtccgttatcaacttgaaaaagtggcaccgagtcggtgcgcccaaggggtgttcactgctggcctccgcagtccccaccacagccagaacct

SEQ ID NO: 426 - RNA, 150 nt, synthetic construct
  misc_feature 1..150: note = Description of Artificial Sequence: Synthetic polynucleotide
  source 1..150: mol_type = other RNA
gaggaaggttctggctgtggtgttttagagctagaaatagcaagttaaaataaggctagtccgttatcaacttgaaaaagtggcaccgagtcggtgcaggggtgttcactgctggcctccgcagtccccaccacagccagaacttttttt

SEQ ID NO: 427 - RNA, 150 nt, synthetic construct
  misc_feature 1..150: note = Description of Artificial Sequence: Synthetic polynucleotide
  source 1..150: mol_type = other RNA
aggaaggttctggctgtggtgttttagagctagaaatagcaagttaaaataaggctagtccgttatcaacttgaaaaagtggcaccgagtcggtgcacgcccaaggggtgttcactgctggcctccgcagtccccaccacagccagaacc

SEQ ID NO: 428 - RNA, 150 nt, synthetic construct
  misc_feature 1..150: note = Description of Artificial Sequence: Synthetic polynucleotide
  source 1..150: mol_type = other RNA
gaggaaggttctggctgtggtgttttagagctagaaatagcaagttaaaataaggctagtccgttatcaacttgaaaaagtggcaccgagtcggtgcgggtgttcactgctggcctccgcagtccccaccacagccagaacctttttttt

SEQ ID NO: 429 - RNA, 150 nt, synthetic construct
  misc_feature 1..150: note = Description of Artificial Sequence: Synthetic polynucleotide
  source 1..150: mol_type = other RNA
aggaaggttctggctgtggtgttttagagctagaaatagcaagttaaaataaggctagtccgttatcaacttgaaaaagtggcaccgagtcggtgctgccacgcccaaggggtgttcactgctggcctccgcagtccccaccacagccag

SEQ ID NO: 430 - RNA, 150 nt, synthetic construct
  misc_feature 1..150: note = Description of Artificial Sequence: Synthetic polynucleotide
  source 1..150: mol_type = other RNA
gaggaaggttctggctgtggtgttttagagctagaaatagcaagttaaaataaggctagtccgttatcaacttgaaaaagtggcaccgagtcggtgcggtgttcactgctggcctccgcagtccccaccacagccagaaccttttttttt

SEQ ID NO: 431 - RNA, 150 nt, synthetic construct
  misc_feature 1..150: note = Description of Artificial Sequence: Synthetic polynucleotide
  source 1..150: mol_type = other RNA
gaggaaggttctggctgtggtgttttagagctagaaatagcaagttaaaataaggctagtccgttatcaacttgaaaaagtggcaccgagtcggtgcggggtgttcactgctggcctccgcagtccccaccacagccagaaccttttttt

SEQ ID NO: 432 - RNA, 150 nt, synthetic construct
  misc_feature 1..150: note = Description of Artificial Sequence: Synthetic polynucleotide
  source 1..150: mol_type = other RNA
gaggaaggttctggctgtggtgttttagagctagaaatagcaagttaaaataaggctagtccgttatcaacttgaaaaagtggcaccgagtcggtgcaaggggtgttcactgctggcctccgcagtccccaccacagccagaattttttt

SEQ ID NO: 433 - RNA, 150 nt, synthetic construct
  misc_feature 1..150: note = Description of Artificial Sequence: Synthetic polynucleotide
  source 1..150: mol_type = other RNA
aggaaggttctggctgtggtgttttagagctagaaatagcaagttaaaataaggctagtccgttatcaacttgaaaaagtggcaccgagtcggtgcgcccaaggggtgttcactgctggcctccgcagtccccaccacagccagaacctt

SEQ ID NO: 434 - RNA, 151 nt, synthetic construct
  misc_feature 1..151: note = Description of Artificial Sequence: Synthetic polynucleotide
  source 1..151: mol_type = other RNA
gaggaaggttctggctgtggtgttttagagctagaaatagcaagttaaaataaggctagtccgttatcaacttgaaaaagtggcaccgagtcggtgcaggggtgttcactgctggcctccgcagtccccaccacagccagaaccttttttt

SEQ ID NO: 435 - RNA, 151 nt, synthetic construct
  misc_feature 1..151: note = Description of Artificial Sequence: Synthetic polynucleotide
  source 1..151: mol_type = other RNA
gaggaaggttctggctgtggtgttttagagctagaaatagcaagttaaaataaggctagtccgttatcaacttgaaaaagtggcaccgagtcggtgcaaggggtgttcactgctggcctccgcagtccccaccacagccagaacttttttt

SEQ ID NO: 436 - RNA, 151 nt, synthetic construct
  misc_feature 1..151: note = Description of Artificial Sequence: Synthetic polynucleotide
  source 1..151: mol_type = other RNA
gaggaaggttctggctgtggtgttttagagctagaaatagcaagttaaaataaggctagtccgttatcaacttgaaaaagtggcaccgagtcggtgcgcccaaggggtgttcactgctggcctccgcagtccccaccacagccattttttt

SEQ ID NO: 437 - RNA, 151 nt, synthetic construct
  misc_feature 1..151: note = Description of Artificial Sequence: Synthetic polynucleotide
  source 1..151: mol_type = other RNA
gaggaaggttctggctgtggtgttttagagctagaaatagcaagttaaaataaggctagtccgttatcaacttgaaaaagtggcaccgagtcggtgcggggtgttcactgctggcctccgcagtccccaccacagccagaacctttttttt

SEQ ID NO: 438 - RNA, 151 nt, synthetic construct
  misc_feature 1..151: note = Description of Artificial Sequence: Synthetic polynucleotide
  source 1..151: mol_type = other RNA
gaggaaggttctggctgtggtgttttagagctagaaatagcaagttaaaataaggctagtccgttatcaacttgaaaaagtggcaccgagtcggtgcgggtgttcactgctggcctccgcagtccccaccacagccagaaccttttttttt

SEQ ID NO: 439 - RNA, 152 nt, synthetic construct
  misc_feature 1..152: note = Description of Artificial Sequence: Synthetic polynucleotide
  source 1..152: mol_type = other RNA
gaggaaggttctggctgtggtgttttagagctagaaatagcaagttaaaataaggctagtccgttatcaacttgaaaaagtggcaccgagtcggtgcgcccaaggggtgttcactgctggcctccgcagtccccaccacagccagttttttt

SEQ ID NO: 440 - RNA, 152 nt, synthetic construct
  misc_feature 1..152: note = Description of Artificial Sequence: Synthetic polynucleotide
  source 1..152: mol_type = other RNA
gaggaaggttctggctgtggtgttttagagctagaaatagcaagttaaaataaggctagtccgttatcaacttgaaaaagtggcaccgagtcggtgcaaggggtgttcactgctggcctccgcagtccccaccacagccagaaccttttttt

SEQ ID NO: 441 - RNA, 152 nt, synthetic construct
  misc_feature 1..152: note = Description of Artificial Sequence: Synthetic polynucleotide
  source 1..152: mol_type = other RNA
gaggaaggttctggctgtggtgttttagagctagaaatagcaagttaaaataaggctagtccgttatcaacttgaaaaagtggcaccgagtcggtgcaggggtgttcactgctggcctccgcagtccccaccacagccagaacctttttttt

SEQ ID NO: 442 - RNA, 152 nt, synthetic construct
  misc_feature 1..152: note = Description of Artificial Sequence: Synthetic polynucleotide
  source 1..152: mol_type = other RNA
aggaaggttctggctgtggtgttttagagctagaaatagcaagttaaaataaggctagtccgttatcaacttgaaaaagtggcaccgagtcggtgcactgccacgcccaaggggtgttcactgctggcctccgcagtccccaccacagccag

SEQ ID NO: 443 - RNA, 152 nt, synthetic construct
  misc_feature 1..152: note = Description of Artificial Sequence: Synthetic polynucleotide
  source 1..152: mol_type = other RNA
gaggaaggttctggctgtggtgttttagagctagaaatagcaagttaaaataaggctagtccgttatcaacttgaaaaagtggcaccgagtcggtgcggggtgttcactgctggcctccgcagtccccaccacagccagaaccttttttttt

SEQ ID NO: 444 - RNA, 152 nt, synthetic construct
  misc_feature 1..152: note = Description of Artificial Sequence: Synthetic polynucleotide
  source 1..152: mol_type = other RNA
aggaaggttctggctgtggtgttttagagctagaaatagcaagttaaaataaggctagtccgttatcaacttgaaaaagtggcaccgagtcggtgcccacgcccaaggggtgttcactgctggcctccgcagtccccaccacagccagaacc

SEQ ID NO: 445 - RNA, 153 nt, synthetic construct
  misc_feature 1..153: note = Description of Artificial Sequence: Synthetic polynucleotide
  source 1..153: mol_type = other RNA
gaggaaggttctggctgtggtgttttagagctagaaatagcaagttaaaataaggctagtccgttatcaacttgaaaaagtggcaccgagtcggtgcaggggtgttcactgctggcctccgcagtccccaccacagccagaaccttttttttt

SEQ ID NO: 446 - RNA, 153 nt, synthetic construct
  misc_feature 1..153: note = Description of Artificial Sequence: Synthetic polynucleotide
  source 1..153: mol_type = other RNA
gaggaaggttctggctgtggtgttttagagctagaaatagcaagttaaaataaggctagtccgttatcaacttgaaaaagtggcaccgagtcggtgcaaggggtgttcactgctggcctccgcagtccccaccacagccagaacctttttttt

SEQ ID NO: 447 - RNA, 153 nt, synthetic construct
  misc_feature 1..153: note = Description of Artificial Sequence: Synthetic polynucleotide
  source 1..153: mol_type = other RNA
gaggaaggttctggctgtggtgttttagagctagaaatagcaagttaaaataaggctagtccgttatcaacttgaaaaagtggcaccgagtcggtgcgcccaaggggtgttcactgctggcctccgcagtccccaccacagccagattttttt

SEQ ID NO: 448 - RNA, 154 nt, synthetic construct
  misc_feature 1..154: note = Description of Artificial Sequence: Synthetic polynucleotide
  source 1..154: mol_type = other RNA
aggaaggttctggctgtggtgttttagagctagaaatagcaagttaaaataaggctagtccgttatcaacttgaaaaagtggcaccgagtcggtgctgactgccacgcccaaggggtgttcactgctggcctccgcagtccccaccacagccag

SEQ ID NO: 449 - RNA, 154 nt, synthetic construct
  misc_feature 1..154: note = Description of Artificial Sequence: Synthetic polynucleotide
  source 1..154: mol_type = other RNA
aggaaggttctggctgtggtgttttagagctagaaatagcaagttaaaataaggctagtccgttatcaacttgaaaaagtggcaccgagtcggtgctgccacgcccaaggggtgttcactgctggcctccgcagtccccaccacagccagaacc

SEQ ID NO: 450 - RNA, 154 nt, synthetic construct
  misc_feature 1..154: note = Description of Artificial Sequence: Synthetic polynucleotide
  source 1..154: mol_type = other RNA
gaggaaggttctggctgtggtgttttagagctagaaatagcaagttaaaataaggctagtccgttatcaacttgaaaaagtggcaccgagtcggtgcaaggggtgttcactgctggcctccgcagtccccaccacagccagaaccttttttttt

SEQ ID NO: 451 - RNA, 154 nt, synthetic construct
  misc_feature 1..154: note = Description of Artificial Sequence: Synthetic polynucleotide
  source 1..154: mol_type = other RNA
gaggaaggttctggctgtggtgttttagagctagaaatagcaagttaaaataaggctagtccgttatcaacttgaaaaagtggcaccgagtcggtgcgcccaaggggtgttcactgctggcctccgcagtccccaccacagccagaattttttt

SEQ ID NO: 452 - RNA, 155 nt, synthetic construct
  misc_feature 1..155: note = Description of Artificial Sequence: Synthetic polynucleotide
  source 1..155: mol_type = other RNA
gaggaaggttctggctgtggtgttttagagctagaaatagcaagttaaaataaggctagtccgttatcaacttgaaaaagtggcaccgagtcggtgcgcccaaggggtgttcactgctggcctccgcagtccccaccacagccagaacttttttt

SEQ ID NO: 453 - RNA, 156 nt, synthetic construct
  misc_feature 1..156: note = Description of Artificial Sequence: Synthetic polynucleotide
  source 1..156: mol_type = other RNA
aggaaggttctggctgtggtgttttagagctagaaatagcaagttaaaataaggctagtccgttatcaacttgaaaaagtggcaccgagtcggtgcactgccacgcccaaggggtgttcactgctggcctccgcagtccccaccacagccagaacc

SEQ ID NO: 454 - RNA, 156 nt, synthetic construct
  misc_feature 1..156: note = Description of Artificial Sequence: Synthetic polynucleotide
  source 1..156: mol_type = other RNA
aggaaggttctggctgtggtgttttagagctagaaatagcaagttaaaataaggctagtccgttatcaacttgaaaaagtggcaccgagtcggtgcggtgactgccacgcccaaggggtgttcactgctggcctccgcagtccccaccacagccag

SEQ ID NO: 455 - RNA, 156 nt, synthetic construct
  misc_feature 1..156: note = Description of Artificial Sequence: Synthetic polynucleotide
  source 1..156: mol_type = other RNA
gaggaaggttctggctgtggtgttttagagctagaaatagcaagttaaaataaggctagtccgttatcaacttgaaaaagtggcaccgagtcggtgcgcccaaggggtgttcactgctggcctccgcagtccccaccacagccagaaccttttttt

SEQ ID NO: 456 - RNA, 157 nt, synthetic construct
  misc_feature 1..157: note = Description of Artificial Sequence: Synthetic polynucleotide
  source 1..157: mol_type = other RNA
gaggaaggttctggctgtggtgttttagagctagaaatagcaagttaaaataaggctagtccgttatcaacttgaaaaagtggcaccgagtcggtgcgcccaaggggtgttcactgctggcctccgcagtccccaccacagccagaacctttttttt

SEQ ID NO: 457 - RNA, 158 nt, synthetic construct
  misc_feature 1..158: note = Description of Artificial Sequence: Synthetic polynucleotide
  source 1..158: mol_type = other RNA
aggaaggttctggctgtggtgttttagagctagaaatagcaagttaaaataaggctagtccgttatcaacttgaaaaagtggcaccgagtcggtgcttggtgactgccacgcccaaggggtgttcactgctggcctccgcagtccccaccacagccag

SEQ ID NO: 458 - RNA, 158 nt, synthetic construct
  misc_feature 1..158: note = Description of Artificial Sequence: Synthetic polynucleotide
  source 1..158: mol_type = other RNA
aggaaggttctggctgtggtgttttagagctagaaatagcaagttaaaataaggctagtccgttatcaacttgaaaaagtggcaccgagtcggtgctgactgccacgcccaaggggtgttcactgctggcctccgcagtccccaccacagccagaacc

SEQ ID NO: 459 - RNA, 158 nt, synthetic construct
  misc_feature 1..158: note = Description of Artificial Sequence: Synthetic polynucleotide
  source 1..158: mol_type = other RNA
gaggaaggttctggctgtggtgttttagagctagaaatagcaagttaaaataaggctagtccgttatcaacttgaaaaagtggcaccgagtcggtgcgcccaaggggtgttcactgctggcctccgcagtccccaccacagccagaaccttttttttt

SEQ ID NO: 460 - RNA, 160 nt, synthetic construct
  misc_feature 1..160: note = Description of Artificial Sequence: Synthetic polynucleotide
  source 1..160: mol_type = other RNA
aggaaggttctggctgtggtgttttagagctagaaatagcaagttaaaataaggctagtccgttatcaacttgaaaaagtggcaccgagtcggtgcatttggtgactgccacgcccaaggggtgttcactgctggcctccgcagtccccaccacagccag

SEQ ID NO: 461 - RNA, 160 nt, synthetic construct
  misc_feature 1..160: note = Description of Artificial Sequence: Synthetic polynucleotide
  source 1..160: mol_type = other RNA
aggaaggttctggctgtggtgttttagagctagaaatagcaagttaaaataaggctagtccgttatcaacttgaaaaagtggcaccgagtcggtgcggtgactgccacgcccaaggggtgttcactgctggcctccgcagtccccaccacagccagaacc

SEQ ID NO: 462 - RNA, 162 nt, synthetic construct
  misc_feature 1..162: note = Description of Artificial Sequence: Synthetic polynucleotide
  source 1..162: mol_type = other RNA
aggaaggttctggctgtggtgttttagagctagaaatagcaagttaaaataaggctagtccgttatcaacttgaaaaagtggcaccgagtcggtgcgtatttggtgactgccacgcccaaggggtgttcactgctggcctccgcagtccccaccacagccag

SEQ ID NO: 463 - RNA, 162 nt, synthetic construct
  misc_feature 1..162: note = Description of Artificial Sequence: Synthetic polynucleotide
  source 1..162: mol_type = other RNA
aggaaggttctggctgtggtgttttagagctagaaatagcaagttaaaataaggctagtccgttatcaacttgaaaaagtggcaccgagtcggtgcttggtgactgccacgcccaaggggtgttcactgctggcctccgcagtccccaccacagccagaacc

SEQ ID NO: 464 - RNA, 164 nt, synthetic construct
  misc_feature 1..164: note = Description of Artificial Sequence: Synthetic polynucleotide
  source 1..164: mol_type = other RNA
aggaaggttctggctgtggtgttttagagctagaaatagcaagttaaaataaggctagtccgttatcaacttgaaaaagtggcaccgagtcggtgccagtatttggtgactgccacgcccaaggggtgttcactgctggcctccgcagtccccaccacagccag

SEQ ID NO: 465 - RNA, 164 nt, synthetic construct
  misc_feature 1..164: note = Description of Artificial Sequence: Synthetic polynucleotide
  source 1..164: mol_type = other RNA
aggaaggttctggctgtggtgttttagagctagaaatagcaagttaaaataaggctagtccgttatcaacttgaaaaagtggcaccgagtcggtgcatttggtgactgccacgcccaaggggtgttcactgctggcctccgcagtccccaccacagccagaacc

SEQ ID NO: 466 - RNA, 166 nt, synthetic construct
  misc_feature 1..166: note = Description of Artificial Sequence: Synthetic polynucleotide
  source 1..166: mol_type = other RNA
aggaaggttctggctgtggtgttttagagctagaaatagcaagttaaaataaggctagtccgttatcaacttgaaaaagtggcaccgagtcggtgctacagtatttggtgactgccacgcccaaggggtgttcactgctggcctccgcagtccccaccacagccag

SEQ ID NO: 467 - RNA, 166 nt, synthetic construct
  misc_feature 1..166: note = Description of Artificial Sequence: Synthetic polynucleotide
  source 1..166: mol_type = other RNA
aggaaggttctggctgtggtgttttagagctagaaatagcaagttaaaataaggctagtccgttatcaacttgaaaaagtggcaccgagtcggtgcgtatttggtgactgccacgcccaaggggtgttcactgctggcctccgcagtccccaccacagccagaacc

SEQ ID NO: 468 - RNA, 168 nt, synthetic construct
  misc_feature 1..168: note = Description of Artificial Sequence: Synthetic polynucleotide
  source 1..168: mol_type = other RNA
aggaaggttctggctgtggtgttttagagctagaaatagcaagttaaaataaggctagtccgttatcaacttgaaaaagtggcaccgagtcggtgctttacagtatttggtgactgccacgcccaaggggtgttcactgctggcctccgcagtccccaccacagccag

SEQ ID NO: 469 - RNA, 168 nt, synthetic construct
  misc_feature 1..168: note = Description of Artificial Sequence: Synthetic polynucleotide
  source 1..168: mol_type = other RNA
aggaaggttctggctgtggtgttttagagctagaaatagcaagttaaaataaggctagtccgttatcaacttgaaaaagtggcaccgagtcggtgccagtatttggtgactgccacgcccaaggggtgttcactgctggcctccgcagtccccaccacagccagaacc

SEQ ID NO: 470 - RNA, 170 nt, synthetic construct
  misc_feature 1..170: note = Description of Artificial Sequence: Synthetic polynucleotide
  source 1..170: mol_type = other RNA
aggaaggttctggctgtggtgttttagagctagaaatagcaagttaaaataaggctagtccgttatcaacttgaaaaagtggcaccgagtcggtgctacagtatttggtgactgccacgcccaaggggtgttcactgctggcctccgcagtccccaccacagccagaacc

SEQ ID NO: 471 - RNA, 170 nt, synthetic construct
  misc_feature 1..170: note = Description of Artificial Sequence: Synthetic polynucleotide
  source 1..170: mol_type = other RNA
aggaaggttctggctgtggtgttttagagctagaaatagcaagttaaaataaggctagtccgttatcaacttgaaaaagtggcaccgagtcggtgctctttacagtatttggtgactgccacgcccaaggggtgttcactgctggcctccgcagtccccaccacagccag

SEQ ID NO: 472 - RNA, 172 nt, synthetic construct
  misc_feature 1..172: note = Description of Artificial Sequence: Synthetic polynucleotide
  source 1..172: mol_type = other RNA
aggaaggttctggctgtggtgttttagagctagaaatagcaagttaaaataaggctagtccgttatcaacttgaaaaagtggcaccgagtcggtgctttacagtatttggtgactgccacgcccaaggggtgttcactgctggcctccgcagtccccaccacagccagaacc

SEQ ID NO: 473 - RNA, 172 nt, synthetic construct
  misc_feature 1..172: note = Description of Artificial Sequence: Synthetic polynucleotide
  source 1..172: mol_type = other RNA
aggaaggttctggctgtggtgttttagagctagaaatagcaagttaaaataaggctagtccgttatcaacttgaaaaagtggcaccgagtcggtgccctctttacagtatttggtgactgccacgcccaaggggtgttcactgctggcctccgcagtccccaccacagccag

SEQ ID NO: 474 - RNA, 174 nt, synthetic construct
  misc_feature 1..174: note = Description of Artificial Sequence: Synthetic polynucleotide
  source 1..174: mol_type = other RNA
aggaaggttctggctgtggtgttttagagctagaaatagcaagttaaaataaggctagtccgttatcaacttgaaaaagtggcaccgagtcggtgctacctctttacagtatttggtgactgccacgcccaaggggtgttcactgctggcctccgcagtccccaccacagccag

SEQ ID NO: 475 - RNA, 174 nt, synthetic construct
  misc_feature 1..174: note = Description of Artificial Sequence: Synthetic polynucleotide
  source 1..174: mol_type = other RNA
aggaaggttctggctgtggtgttttagagctagaaatagcaagttaaaataaggctagtccgttatcaacttgaaaaagtggcaccgagtcggtgctctttacagtatttggtgactgccacgcccaaggggtgttcactgctggcctccgcagtccccaccacagccagaacc

SEQ ID NO: 476 - RNA, 176 nt, synthetic construct
  misc_feature 1..176: note = Description of Artificial Sequence: Synthetic polynucleotide
  source 1..176: mol_type = other RNA
aggaaggttctggctgtggtgttttagagctagaaatagcaagttaaaataaggctagtccgttatcaacttgaaaaagtggcaccgagtcggtgccctctttacagtatttggtgactgccacgcccaaggggtgttcactgctggcctccgcagtccccaccacagccagaacc

SEQ ID NO: 477 - RNA, 176 nt, synthetic construct
  misc_feature 1..176: note = Description of Artificial Sequence: Synthetic polynucleotide
  source 1..176: mol_type = other RNA
aggaaggttctggctgtggtgttttagagctagaaatagcaagttaaaataaggctagtccgttatcaacttgaaaaagtggcaccgagtcggtgccgtacctctttacagtatttggtgactgccacgcccaaggggtgttcactgctggcctccgcagtccccaccacagccag

SEQ ID NO: 478 - RNA, 178 nt, synthetic construct
  misc_feature 1..178: note = Description of Artificial Sequence: Synthetic polynucleotide
  source 1..178: mol_type = other RNA
aggaaggttctggctgtggtgttttagagctagaaatagcaagttaaaataaggctagtccgttatcaacttgaaaaagtggcaccgagtcggtgccacgtacctctttacagtatttggtgactgccacgcccaaggggtgttcactgctggcctccgcagtccccaccacagccag

SEQ ID NO: 479 - RNA, 178 nt, synthetic construct
  misc_feature 1..178: note = Description of Artificial Sequence: Synthetic polynucleotide
  source 1..178: mol_type = other RNA
aggaaggttctggctgtggtgttttagagctagaaatagcaagttaaaataaggctagtccgttatcaacttgaaaaagtggcaccgagtcggtgctacctctttacagtatttggtgactgccacgcccaaggggtgttcactgctggcctccgcagtccccaccacagccagaacc

SEQ ID NO: 480 - RNA, 180 nt, synthetic construct
  misc_feature 1..180: note = Description of Artificial Sequence: Synthetic polynucleotide
  source 1..180: mol_type = other RNA
aggaaggttctggctgtggtgttttagagctagaaatagcaagttaaaataaggctagtccgttatcaacttgaaaaagtggcaccgagtcggtgctccacgtacctctttacagtatttggtgactgccacgcccaaggggtgttcactgctggcctccgcagtccccaccacagccag

SEQ ID NO: 481 - RNA, 180 nt, synthetic construct
  misc_feature 1..180: note = Description of Artificial Sequence: Synthetic polynucleotide
  source 1..180: mol_type = other RNA
aggaaggttctggctgtggtgttttagagctagaaatagcaagttaaaataaggctagtccgttatcaacttgaaaaagtggcaccgagtcggtgccgtacctctttacagtatttggtgactgccacgcccaaggggtgttcactgctggcctccgcagtccccaccacagccagaacc

SEQ ID NO: 482 - RNA, 182 nt, synthetic construct
  misc_feature 1..182: note = Description of Artificial Sequence: Synthetic polynucleotide
  source 1..182: mol_type = other RNA
aggaaggttctggctgtggtgttttagagctagaaatagcaagttaaaataaggctagtccgttatcaacttgaaaaagtggcaccgagtcggtgccacgtacctctttacagtatttggtgactgccacgcccaaggggtgttcactgctggcctccgcagtccccaccacagccagaacc

SEQ ID NO: 483 - RNA, 20 nt, synthetic construct
  misc_feature 1..20: note = Description of Artificial Sequence: Synthetic oligonucleotide
  source 1..20: mol_type = other RNA
ggaaggttctggctgtggtg

SEQ ID NO: 484-486 - skipped (3 entries)

SEQ ID NO: 487 - RNA, 10 nt, synthetic construct
  misc_feature 1..10: note = Description of Artificial Sequence: Synthetic oligonucleotide
  source 1..10: mol_type = other RNA
cacagccaga

SEQ ID NO: 488 - RNA, 11 nt, synthetic construct
  misc_feature 1..11: note = Description of Artificial Sequence: Synthetic oligonucleotide
  source 1..11: mol_type = other RNA
cacagccagaa

SEQ ID NO: 489 - RNA, 12 nt, synthetic construct
  misc_feature 1..12: note = Description of Artificial Sequence: Synthetic oligonucleotide
  source 1..12: mol_type = other RNA
cacagccagaac

SEQ ID NO: 490 - RNA, 13 nt, synthetic construct
  misc_feature 1..13: note = Description of Artificial Sequence: Synthetic oligonucleotide
  source 1..13: mol_type = other RNA
cacagccagaacc

SEQ ID NO: 491 - RNA, 14 nt, synthetic construct
  misc_feature 1..14: note = Description of Artificial Sequence: Synthetic oligonucleotide
  source 1..14: mol_type = other RNA
cacagccagaacct

SEQ ID NO: 492 - RNA, 15 nt, synthetic construct
  misc_feature 1..15: note = Description of Artificial Sequence: Synthetic oligonucleotide
  source 1..15: mol_type = other RNA
cacagccagaacctt

SEQ ID NO: 493 - RNA, 16 nt, synthetic construct
  misc_feature 1..16: note = Description of Artificial Sequence: Synthetic oligonucleotide
  source 1..16: mol_type = other RNA
cacagccagaaccttc

SEQ ID NO: 494 - RNA, 17 nt, synthetic construct
  misc_feature 1..17: note = Description of Artificial Sequence: Synthetic oligonucleotide
  source 1..17: mol_type = other RNA
cacagccagaaccttcc

SEQ ID NO: 495 - RNA, 18 nt, synthetic construct
  misc_feature 1..18: note = Description of Artificial Sequence: Synthetic oligonucleotide
  source 1..18: mol_type = other RNA
ggcctccgcagtccccac

SEQ ID NO: 496 - RNA, 20 nt, synthetic construct
  misc_feature 1..20: note = Description of Artificial Sequence: Synthetic oligonucleotide
  source 1..20: mol_type = other RNA
ctggcctccgcagtccccac

SEQ ID NO: 497 - RNA, 22 nt, synthetic construct
  misc_feature 1..22: note = Description of Artificial Sequence: Synthetic oligonucleotide
  source 1..22: mol_type = other RNA
tgctggcctccgcagtccccac

SEQ ID NO: 498 - RNA, 24 nt, synthetic construct
  misc_feature 1..24: note = Description of Artificial Sequence: Synthetic oligonucleotide
  source 1..24: mol_type = other RNA
actgctggcctccgcagtccccac

SEQ ID NO: 499 - RNA, 26 nt, synthetic construct
  misc_feature 1..26: note = Description of Artificial Sequence: Synthetic oligonucleotide
  source 1..26: mol_type = other RNA
tcactgctggcctccgcagtccccac

SEQ ID NO: 500 - RNA, 28 nt, synthetic construct
  misc_feature 1..28: note = Description of Artificial Sequence: Synthetic oligonucleotide
  source 1..28: mol_type = other RNA
gttcactgctggcctccgcagtccccac

SEQ ID NO: 501 - RNA, 30 nt, synthetic construct
  misc_feature 1..30: note = Description of Artificial Sequence: Synthetic oligonucleotide
  source 1..30: mol_type = other RNA
gtgttcactgctggcctccgcagtccccac

SEQ ID NO: 502 - RNA, 31 nt, synthetic construct
  misc_feature 1..31: note = Description of Artificial Sequence: Synthetic oligonucleotide
  source 1..31: mol_type = other RNA
ggtgttcactgctggcctccgcagtccccac

SEQ ID NO: 503 - RNA, 32 nt, synthetic construct
  misc_feature 1..32: note = Description of Artificial Sequence: Synthetic oligonucleotide
  source 1..32: mol_type = other RNA
gggtgttcactgctggcctccgcagtccccac

SEQ ID NO: 504 - RNA, 33 nt, synthetic construct
  misc_feature 1..33: note = Description of Artificial Sequence: Synthetic oligonucleotide
  source 1..33: mol_type = other RNA
ggggtgttcactgctggcctccgcagtccccac

SEQ ID NO: 505 - RNA, 34 nt, synthetic construct
  misc_feature 1..34: note = Description of Artificial Sequence: Synthetic oligonucleotide
  source 1..34: mol_type = other RNA
aggggtgttcactgctggcctccgcagtccccac

SEQ ID NO: 506 - RNA, 35 nt, synthetic construct
  misc_feature 1..35: note = Description of Artificial Sequence: Synthetic oligonucleotide
  source 1..35: mol_type = other RNA
aaggggtgttcactgctggcctccgcagtccccac

SEQ ID NO: 507 - RNA, 36 nt, synthetic construct
  misc_feature 1..36: note = Description of Artificial Sequence: Synthetic oligonucleotide
  source 1..36: mol_type = other RNA
caaggggtgttcactgctggcctccgcagtccccac

SEQ ID NO: 508 - RNA, 38 nt, synthetic construct
  misc_feature 1..38: note = Description of Artificial Sequence: Synthetic oligonucleotide
  source 1..38: mol_type = other RNA
cccaaggggtgttcactgctggcctccgcagtccccac

SEQ ID NO: 509 - RNA, 39 nt, synthetic construct
  misc_feature 1..39: note = Description of Artificial Sequence: Synthetic oligonucleotide
  source 1..39: mol_type = other RNA
gcccaaggggtgttcactgctggcctccgcagtccccac

SEQ ID NO: 510 - RNA, 40 nt, synthetic construct
  misc_feature 1..40: note = Description of Artificial Sequence: Synthetic oligonucleotide
  source 1..40: mol_type = other RNA
cgcccaaggggtgttcactgctggcctccgcagtccccac

SEQ ID NO: 511 - RNA, 42 nt, synthetic construct
  misc_feature 1..42: note = Description of Artificial Sequence: Synthetic oligonucleotide
  source 1..42: mol_type = other RNA
cacgcccaaggggtgttcactgctggcctccgcagtccccac

SEQ ID NO: 512 - RNA, 44 nt, synthetic construct
  misc_feature 1..44: note = Description of Artificial Sequence: Synthetic oligonucleotide
  source 1..44: mol_type = other RNA
gccacgcccaaggggtgttcactgctggcctccgcagtccccac

SEQ ID NO: 513 - RNA, 46 nt, synthetic construct
  misc_feature 1..46: note = Description of Artificial Sequence: Synthetic oligonucleotide
  source 1..46: mol_type = other RNA
ctgccacgcccaaggggtgttcactgctggcctccgcagtccccac

SEQ ID NO: 514 - RNA, 48 nt, synthetic construct
  misc_feature 1..48: note = Description of Artificial Sequence: Synthetic oligonucleotide
  source 1..48: mol_type = other RNA
gactgccacgcccaaggggtgttcactgctggcctccgcagtccccac

SEQ ID NO: 515 - RNA, 50 nt, synthetic construct
  misc_feature 1..50: note = Description of Artificial Sequence: Synthetic oligonucleotide
  source 1..50: mol_type = other RNA
gtgactgccacgcccaaggggtgttcactgctggcctccgcagtccccac

SEQ ID NO: 516 - RNA, 52 nt, synthetic construct
  misc_feature 1..52: note = Description of Artificial Sequence: Synthetic oligonucleotide
  source 1..52: mol_type = other RNA
tggtgactgccacgcccaaggggtgttcactgctggcctccgcagtccccac

SEQ ID NO: 517 - RNA, 54 nt, synthetic construct
  misc_feature 1..54: note = Description of Artificial Sequence: Synthetic oligonucleotide
  source 1..54: mol_type = other RNA
tttggtgactgccacgcccaaggggtgttcactgctggcctccgcagtccccac

SEQ ID NO: 518 - RNA, 56 nt, synthetic construct
  misc_feature 1..56: note = Description of Artificial Sequence: Synthetic oligonucleotide
  source 1..56: mol_type = other RNA
tatttggtgactgccacgcccaaggggtgttcactgctggcctccgcagtccccac

SEQ ID NO: 519 - RNA, 58 nt, synthetic construct
  misc_feature 1..58: note = Description of Artificial Sequence: Synthetic oligonucleotide
  source 1..58: mol_type = other RNA
agtatttggtgactgccacgcccaaggggtgttcactgctggcctccgcagtccccac

SEQ ID NO: 520 - RNA, 60 nt, synthetic construct
  misc_feature 1..60: note = Description of Artificial Sequence: Synthetic oligonucleotide
  source 1..60: mol_type = other RNA
acagtatttggtgactgccacgcccaaggggtgttcactgctggcctccgcagtccccac

SEQ ID NO: 521 - RNA, 62 nt, synthetic construct
  misc_feature 1..62: note = Description of Artificial Sequence: Synthetic oligonucleotide
  source 1..62: mol_type = other RNA
ttacagtatttggtgactgccacgcccaaggggtgttcactgctggcctccgcagtccccac

SEQ ID NO: 522 - RNA, 64 nt, synthetic construct
  misc_feature 1..64: note = Description of Artificial Sequence: Synthetic oligonucleotide
  source 1..64: mol_type = other RNA
ctttacagtatttggtgactgccacgcccaaggggtgttcactgctggcctccgcagtccccac

SEQ ID NO: 523 - RNA, 66 nt, synthetic construct
  misc_feature 1..66: note = Description of Artificial Sequence: Synthetic oligonucleotide
  source 1..66: mol_type = other RNA
ctctttacagtatttggtgactgccacgcccaaggggtgttcactgctggcctccgcagtccccac

SEQ ID NO: 524 - RNA, 68 nt, synthetic construct
  misc_feature 1..68: note = Description of Artificial Sequence: Synthetic oligonucleotide
  source 1..68: mol_type = other RNA
acctctttacagtatttggtgactgccacgcccaaggggtgttcactgctggcctccgcagtccccac

SEQ ID NO: 525 - RNA, 70 nt, synthetic construct
  misc_feature 1..70: note = Description of Artificial Sequence: Synthetic oligonucleotide
  source 1..70: mol_type = other RNA
gtacctctttacagtatttggtgactgccacgcccaaggggtgttcactgctggcctccgcagtccccac

SEQ ID NO: 526 - RNA, 72 nt, synthetic construct
  misc_feature 1..72: note = Description of Artificial Sequence: Synthetic oligonucleotide
  source 1..72: mol_type = other RNA
acgtacctctttacagtatttggtgactgccacgcccaaggggtgttcactgctggcctccgcagtccccac

SEQ ID NO: 527 - RNA, 74 nt, synthetic construct
  misc_feature 1..74: note = Description of Artificial Sequence: Synthetic oligonucleotide
  source 1..74: mol_type = other RNA
ccacgtacctctttacagtatttggtgactgccacgcccaaggggtgttcactgctggcctccgcagtccccac

SEQ ID NO: 528 - RNA, 76 nt, synthetic construct
  misc_feature 1..76: note = Description of Artificial Sequence: Synthetic oligonucleotide
  source 1..76: mol_type = other RNA
gtccacgtacctctttacagtatttggtgactgccacgcccaaggggtgttcactgctggcctccgcagtccccac

SEQ ID NO: 529 - RNA, 20 nt, synthetic construct
  misc_feature 1..20: note = Description of Artificial Sequence: Synthetic oligonucleotide
  source 1..20: mol_type = other RNA
gaataaaagagcattggcgg

SEQ ID NO: 530 - RNA, 122 nt, synthetic construct
  misc_feature 1..122: note = Description of Artificial Sequence: Synthetic polynucleotide
  source 1..122: mol_type = other RNA
ggaaggttctggctgtggtggttttagagctagaaatagcaagttaaaataaggctagtccgttatcaacttgaaaaagtggcaccgagtcggtgcggcctccgcagtccccaccacagcca

SEQ ID NO: 531 - RNA, 124 nt, synthetic construct
  misc_feature 1..124: note = Description of Artificial Sequence: Synthetic polynucleotide
  source 1..124: mol_type = other RNA
ggaaggttctggctgtggtggttttagagctagaaatagcaagttaaaataaggctagtccgttatcaacttgaaaaagtggcaccgagtcggtgcctggcctccgcagtccccaccacagcca

SEQ ID NO: 532 - RNA, 126 nt, synthetic construct
  misc_feature 1..126: note = Description of Artificial Sequence: Synthetic polynucleotide
  source 1..126: mol_type = other RNA
ggaaggttctggctgtggtggttttagagctagaaatagcaagttaaaataaggctagtccgttatcaacttgaaaaagtggcaccgagtcggtgctgctggcctccgcagtccccaccacagcca

SEQ ID NO: 533 - RNA, 126 nt, synthetic construct
  misc_feature 1..126: note = Description of Artificial Sequence: Synthetic polynucleotide
  source 1..126: mol_type = other RNA
ggaaggttctggctgtggtggttttagagctagaaatagcaagttaaaataaggctagtccgttatcaacttgaaaaagtggcaccgagtcggtgcggcctccgcagtccccaccacagccagaac

SEQ ID NO: 534 - RNA, 128 nt, synthetic construct
  misc_feature 1..128: note = Description of Artificial Sequence: Synthetic polynucleotide
  source 1..128: mol_type = other RNA
ggaaggttctggctgtggtggttttagagctagaaatagcaagttaaaataaggctagtccgttatcaacttgaaaaagtggcaccgagtcggtgcactgctggcctccgcagtccccaccacagcca

SEQ ID NO: 535 - RNA, 128 nt, synthetic construct
  misc_feature 1..128: note = Description of Artificial Sequence: Synthetic polynucleotide
  source 1..128: mol_type = other RNA
ggaaggttctggctgtggtggttttagagctagaaatagcaagttaaaataaggctagtccgttatcaacttgaaaaagtggcaccgagtcggtgcctggcctccgcagtccccaccacagccagaac

SEQ ID NO: 536 - RNA, 130 nt, synthetic construct
  misc_feature 1..130: note = Description of Artificial Sequence: Synthetic polynucleotide
  source 1..130: mol_type = other RNA
ggaaggttctggctgtggtggttttagagctagaaatagcaagttaaaataaggctagtccgttatcaacttgaaaaagtggcaccgagtcggtgctgctggcctccgcagtccccaccacagccagaac

SEQ ID NO: 537 - RNA, 130 nt, synthetic construct
  misc_feature 1..130: note = Description of Artificial Sequence: Synthetic polynucleotide
  source 1..130: mol_type = other RNA
ggaaggttctggctgtggtggttttagagctagaaatagcaagttaaaataaggctagtccgttatcaacttgaaaaagtggcaccgagtcggtgctcactgctggcctccgcagtccccaccacagcca

SEQ ID NO: 538 - RNA, 132 nt, synthetic construct
  misc_feature 1..132: note = Description of Artificial Sequence: Synthetic polynucleotide
  source 1..132: mol_type = other RNA
ggaaggttctggctgtggtggttttagagctagaaatagcaagttaaaataaggctagtccgttatcaacttgaaaaagtggcaccgagtcggtgcgttcactgctggcctccgcagtccccaccacagcca

SEQ ID NO: 539 - RNA, 132 nt, synthetic construct
  misc_feature 1..132: note = Description of Artificial Sequence: Synthetic polynucleotide
  source 1..132: mol_type = other RNA
ggaaggttctggctgtggtggttttagagctagaaatagcaagttaaaataaggctagtccgttatcaacttgaaaaagtggcaccgagtcggtgcactgctggcctccgcagtccccaccacagccagaac

SEQ ID NO: 540 - RNA, 134 nt, synthetic construct
  misc_feature 1..134: note = Description of Artificial Sequence: Synthetic polynucleotide
  source 1..134: mol_type = other RNA
ggaaggttctggctgtggtggttttagagctagaaatagcaagttaaaataaggctagtccgttatcaacttgaaaaagtggcaccgagtcggtgctcactgctggcctccgcagtccccaccacagccagaac

SEQ ID NO: 541 - RNA, 134 nt, synthetic construct
  misc_feature 1..134: note = Description of Artificial Sequence: Synthetic polynucleotide
  source 1..134: mol_type = other RNA
ggaaggttctggctgtggtggttttagagctagaaatagcaagttaaaataaggctagtccgttatcaacttgaaaaagtggcaccgagtcggtgcgtgttcactgctggcctccgcagtccccaccacagcca

SEQ ID NO: 542 - RNA, 134 nt, synthetic construct
  misc_feature 1..134: note = Description of Artificial Sequence: Synthetic polynucleotide
  source 1..134: mol_type = other RNA
ggaaggttctggctgtggtggttttagagctagaaatagcaagttaaaataaggctagtccgttatcaacttgaaaaagtggcaccgagtcggtgcggtgttcactgctggcctccgcagtccccaccacagcc

SEQ ID NO: 543 - RNA, 135 nt, synthetic construct
  misc_feature 1..135: note = Description of Artificial Sequence: Synthetic polynucleotide
  source 1..135: mol_type = other RNA
ggaaggttctggctgtggtggttttagagctagaaatagcaagttaaaataaggctagtccgttatcaacttgaaaaagtggcaccgagtcggtgcgggtgttcactgctggcctccgcagtccccaccacagcc

SEQ ID NO: 544 - RNA, 135 nt, synthetic construct
  misc_feature 1..135: note = Description of Artificial Sequence: Synthetic polynucleotide
  source 1..135: mol_type = other RNA
ggaaggttctggctgtggtggttttagagctagaaatagcaagttaaaataaggctagtccgttatcaacttgaaaaagtggcaccgagtcggtgcggtgttcactgctggcctccgcagtccccaccacagcca

SEQ ID NO: 545 - RNA, 136 nt, synthetic construct
  misc_feature 1..136: note = Description of Artificial Sequence: Synthetic polynucleotide
  source 1..136: mol_type = other RNA
ggaaggttctggctgtggtggttttagagctagaaatagcaagttaaaataaggctagtccgttatcaacttgaaaaagtggcaccgagtcggtgcgggtgttcactgctggcctccgcagtccccaccacagcca

SEQ ID NO: 546 - RNA, 136 nt, synthetic construct
  misc_feature 1..136: note = Description of Artificial Sequence: Synthetic polynucleotide
  source 1..136: mol_type = other RNA
ggaaggttctggctgtggtggttttagagctagaaatagcaagttaaaataaggctagtccgttatcaacttgaaaaagtggcaccgagtcggtgcggtgttcactgctggcctccgcagtccccaccacagccag

SEQ ID NO: 547 - RNA, 136 nt, synthetic construct
  misc_feature 1..136: note = Description of Artificial Sequence: Synthetic polynucleotide
  source 1..136: mol_type = other RNA
ggaaggttctggctgtggtggttttagagctagaaatagcaagttaaaataaggctagtccgttatcaacttgaaaaagtggcaccgagtcggtgcggggtgttcactgctggcctccgcagtccccaccacagcc

SEQ ID NO: 548 - RNA, 136 nt, synthetic construct
  misc_feature 1..136: note = Description of Artificial Sequence: Synthetic polynucleotide
  source 1..136: mol_type = other RNA
ggaaggttctggctgtggtggttttagagctagaaatagcaagttaaaataaggctagtccgttatcaacttgaaaaagtggcaccgagtcggtgcgttcactgctggcctccgcagtccccaccacagccagaac

SEQ ID NO: 549 - RNA, 137 nt, synthetic construct
  misc_feature 1..137: note = Description of Artificial Sequence: Synthetic polynucleotide
  source 1..137: mol_type = other RNA
ggaaggttctggctgtggtggttttagagctagaaatagcaagttaaaataaggctagtccgttatcaacttgaaaaagtggcaccgagtcggtgcaggggtgttcactgctggcctccgcagtccccaccacagcc

SEQ ID NO: 550 - RNA, 137 nt, synthetic construct
  misc_feature 1..137: note = Description of Artificial Sequence: Synthetic polynucleotide
  source 1..137: mol_type = other RNA
ggaaggttctggctgtggtggttttagagctagaaatagcaagttaaaataaggctagtccgttatcaacttgaaaaagtggcaccgagtcggtgcgggtgttcactgctggcctccgcagtccccaccacagccag

SEQ ID NO: 551 - RNA, 137 nt, synthetic construct
  misc_feature 1..137: note = Description of Artificial Sequence: Synthetic polynucleotide
  source 1..137: mol_type = other RNA
ggaaggttctggctgtggtggttttagagctagaaatagcaagttaaaataaggctagtccgttatcaacttgaaaaagtggcaccgagtcggtgcggggtgttcactgctggcctccgcagtccccaccacagcca

SEQ ID NO: 552 - RNA, 137 nt, synthetic construct
  misc_feature 1..137: note = Description of Artificial Sequence: Synthetic polynucleotide
  source 1..137: mol_type = other RNA
ggaaggttctggctgtggtggttttagagctagaaatagcaagttaaaataaggctagtccgttatcaacttgaaaaagtggcaccgagtcggtgcggtgttcactgctggcctccgcagtccccaccacagccaga

SEQ ID NO: 553 - RNA, 138 nt, synthetic construct
  misc_feature 1..138: note = Description of Artificial Sequence: Synthetic polynucleotide
  source 1..138: mol_type = other RNA
ggaaggttctggctgtggtggttttagagctagaaatagcaagttaaaataaggctagtccgttatcaacttgaaaaagtggcaccgagtcggtgcaggggtgttcactgctggcctccgcagtccccaccacagcca

SEQ ID NO: 554 - RNA, 138 nt, synthetic construct
  misc_feature 1..138: note = Description of Artificial Sequence: Synthetic polynucleotide
  source 1..138: mol_type = other RNA
ggaaggttctggctgtggtggttttagagctagaaatagcaagttaaaataaggctagtccgttatcaacttgaaaaagtggcaccgagtcggtgcgggtgttcactgctggcctccgcagtccccaccacagccaga

SEQ ID NO: 555 - RNA, 138 nt, synthetic construct
  misc_feature 1..138: note = Description of Artificial Sequence: Synthetic polynucleotide
  source 1..138: mol_type = other RNA
ggaaggttctggctgtggtggttttagagctagaaatagcaagttaaaataaggctagtccgttatcaacttgaaaaagtggcaccgagtcggtgcggggtgttcactgctggcctccgcagtccccaccacagccag

SEQ ID NO: 556 - RNA, 138 nt, synthetic construct
  misc_feature 1..138: note = Description of Artificial Sequence: Synthetic polynucleotide
  source 1..138: mol_type = other RNA
ggaaggttctggctgtggtggttttagagctagaaatagcaagttaaaataaggctagtccgttatcaacttgaaaaagtggcaccgagtcggtgcaaggggtgttcactgctggcctccgcagtccccaccacagcc

SEQ ID NO: 557 - RNA, 138 nt, synthetic construct
  misc_feature 1..138: note = Description of Artificial Sequence: Synthetic polynucleotide
  source 1..138: mol_type = other RNA
ggaaggttctggctgtggtggttttagagctagaaatagcaagttaaaataaggctagtccgttatcaacttgaaaaagtggcaccgagtcggtgcgtgttcactgctggcctccgcagtccccaccacagccagaac

SEQ ID NO: 558 - RNA, 138 nt, synthetic construct
  misc_feature 1..138: note = Description of Artificial Sequence: Synthetic polynucleotide
  source 1..138: mol_type = other RNA
ggaaggttctggctgtggtggttttagagctagaaatagcaagttaaaataaggctagtccgttatcaacttgaaaaagtggcaccgagtcggtgcggtgttcactgctggcctccgcagtccccaccacagccagaa

SEQ ID NO: 559 - RNA, 139 nt, synthetic construct
  misc_feature 1..139: note = Description of Artificial Sequence: Synthetic polynucleotide
  source 1..139: mol_type = other RNA
ggaaggttctggctgtggtggttttagagctagaaatagcaagttaaaataaggctagtccgttatcaacttgaaaaagtggcaccgagtcggtgcggggtgttcactgctggcctccgcagtccccaccacagccaga

SEQ ID NO: 560 - RNA, 139 nt, synthetic construct
  misc_feature 1..139: note = Description of Artificial Sequence: Synthetic polynucleotide
  source 1..139: mol_type = other RNA
ggaaggttctggctgtggtggttttagagctagaaatagcaagttaaaataaggctagtccgttatcaacttgaaaaagtggcaccgagtcggtgcaggggtgttcactgctggcctccgcagtccccaccacagccag

SEQ ID NO: 561 - RNA, 139 nt, synthetic construct
  misc_feature 1..139: note = Description of Artificial Sequence: Synthetic polynucleotide
  source 1..139: mol_type = other RNA
ggaaggttctggctgtggtggttttagagctagaaatagcaagttaaaataaggctagtccgttatcaacttgaaaaagtggcaccgagtcggtgcgggtgttcactgctggcctccgcagtccccaccacagccagaa

SEQ ID NO: 562 - RNA, 139 nt, synthetic construct
  misc_feature 1..139: note = Description of Artificial Sequence: Synthetic polynucleotide
  source 1..139: mol_type = other RNA
ggaaggttctggctgtggtggttttagagctagaaatagcaagttaaaataaggctagtccgttatcaacttgaaaaagtggcaccgagtcggtgcaaggggtgttcactgctggcctccgcagtccccaccacagcca

SEQ ID NO: 563 - RNA, 139 nt, synthetic construct
  misc_feature 1..139: note = Description of Artificial Sequence: Synthetic polynucleotide
  source 1..139: mol_type = other RNA
ggaaggttctggctgtggtggttttagagctagaaatagcaagttaaaataaggctagtccgttatcaacttgaaaaagtggcaccgagtcggtgcggtgttcactgctggcctccgcagtccccaccacagccagaac

SEQ ID NO: 564 - RNA, 140 nt, synthetic construct
  misc_feature 1..140: note = Description of Artificial Sequence: Synthetic polynucleotide
  source 1..140: mol_type = other RNA
ggaaggttctggctgtggtggttttagagctagaaatagcaagttaaaataaggctagtccgttatcaacttgaaaaagtggcaccgagtcggtgcgggtgttcactgctggcctccgcagtccccaccacagccagaac

SEQ ID NO: 565 - RNA, 140 nt, synthetic construct
  misc_feature 1..140: note = Description of Artificial Sequence: Synthetic polynucleotide
  source 1..140: mol_type = other RNA
ggaaggttctggctgtggtggttttagagctagaaatagcaagttaaaataaggctagtccgttatcaacttgaaaaagtggcaccgagtcggtgcaaggggtgttcactgctggcctccgcagtccccaccacagccag

SEQ ID NO: 566 - RNA, 140 nt, synthetic construct
  misc_feature 1..140: note = Description of Artificial Sequence: Synthetic polynucleotide
  source 1..140: mol_type = other RNA
ggaaggttctggctgtggtggttttagagctagaaatagcaagttaaaataaggctagtccgttatcaacttgaaaaagtggcaccgagtcggtgcggtgttcactgctggcctccgcagtccccaccacagccagaacc

SEQ ID NO: 567 - RNA, 140 nt, synthetic construct
  misc_feature 1..140: note = Description of Artificial Sequence: Synthetic polynucleotide
  source 1..140: mol_type = other RNA
ggaaggttctggctgtggtggttttagagctagaaatagcaagttaaaataaggctagtccgttatcaacttgaaaaagtggcaccgagtcggtgcaggggtgttcactgctggcctccgcagtccccaccacagccaga

SEQ ID NO: 568 - RNA, 140 nt, synthetic construct
  misc_feature 1..140: note = Description of Artificial Sequence: Synthetic polynucleotide
  source 1..140: mol_type = other RNA
ggaaggttctggctgtggtggttttagagctagaaatagcaagttaaaataaggctagtccgttatcaacttgaaaaagtggcaccgagtcggtgcggggtgttcactgctggcctccgcagtccccaccacagccagaa

SEQ ID NO: 569 - RNA, 140 nt, synthetic construct
  misc_feature 1..140: note = Description of Artificial Sequence: Synthetic polynucleotide
  source 1..140: mol_type = other RNA
ggaaggttctggctgtggtggttttagagctagaaatagcaagttaaaataaggctagtccgttatcaacttgaaaaagtggcaccgagtcggtgccaaggggtgttcactgctggcctccgcagtccccaccacagcca

SEQ ID NO: 570 - RNA, 141 nt, synthetic construct
  misc_feature 1..141: note = Description of Artificial Sequence: Synthetic polynucleotide
  source 1..141: mol_type = other RNA
ggaaggttctggctgtggtggttttagagctagaaatagcaagttaaaataaggctagtccgttatcaacttgaaaaagtggcaccgagtcggtgcggtgttcactgctggcctccgcagtccccaccacagccagaacct

SEQ ID NO: 571 - RNA, 141 nt, synthetic construct
  misc_feature 1..141: note = Description of Artificial Sequence: Synthetic polynucleotide
  source 1..141: mol_type = other RNA
ggaaggttctggctgtggtggttttagagctagaaatagcaagttaaaataaggctagtccgttatcaacttgaaaaagtggcaccgagtcggtgcggggtgttcactgctggcctccgcagtccccaccacagccagaac

SEQ ID NO: 572 - RNA, 141 nt, synthetic construct
  misc_feature 1..141: note = Description of Artificial Sequence: Synthetic polynucleotide
  source 1..141: mol_type = other RNA
ggaaggttctggctgtggtggttttagagctagaaatagcaagttaaaataaggctagtccgttatcaacttgaaaaagtggcaccgagtcggtgcaggggtgttcactgctggcctccgcagtccccaccacagccagaa

SEQ ID NO: 573 - RNA, 141 nt, synthetic construct
  misc_feature 1..141: note = Description of Artificial Sequence: Synthetic polynucleotide
  source 1..141: mol_type = other RNA
ggaaggttctggctgtggtggttttagagctagaaatagcaagttaaaataaggctagtccgttatcaacttgaaaaagtggcaccgagtcggtgcggtgttcactgctggcctccgcagtccccaccacagccttttttt

SEQ ID NO: 574 - RNA, 141 nt, synthetic construct
  misc_feature 1..141: note = Description of Artificial Sequence: Synthetic polynucleotide
  source 1..141: mol_type = other RNA
ggaaggttctggctgtggtggttttagagctagaaatagcaagttaaaataaggctagtccgttatcaacttgaaaaagtggcaccgagtcggtgcaaggggtgttcactgctggcctccgcagtccccaccacagccaga

SEQ ID NO: 575 - RNA, 141 nt, synthetic construct
  misc_feature 1..141: note = Description of Artificial Sequence: Synthetic polynucleotide
  source 1..141: mol_type = other RNA
ggaaggttctggctgtggtggttttagagctagaaatagcaagttaaaataaggctagtccgttatcaacttgaaaaagtggcaccgagtcggtgcgggtgttcactgctggcctccgcagtccccaccacagccagaacc

SEQ ID NO: 576 - RNA, 142 nt, synthetic construct
  misc_feature 1..142: note = Description of Artificial Sequence: Synthetic polynucleotide
  source 1..142: mol_type = other RNA
ggaaggttctggctgtggtggttttagagctagaaatagcaagttaaaataaggctagtccgttatcaacttgaaaaagtggcaccgagtcggtgcggtgttcactgctggcctccgcagtccccaccacagccattttttt

SEQ ID NO: 577 - RNA, 142 nt, synthetic construct
  misc_feature 1..142: note = Description of Artificial Sequence: Synthetic polynucleotide
  source 1..142: mol_type = other RNA
ggaaggttctggctgtggtggttttagagctagaaatagcaagttaaaataaggctagtccgttatcaacttgaaaaagtggcaccgagtcggtgcaaggggtgttcactgctggcctccgcagtccccaccacagccagaa

SEQ ID NO: 578 - RNA, 142 nt, synthetic construct
  misc_feature 1..142: note = Description of Artificial Sequence: Synthetic polynucleotide
  source 1..142: mol_type = other RNA
ggaaggttctggctgtggtggttttagagctagaaatagcaagttaaaataaggctagtccgttatcaacttgaaaaagtggcaccgagtcggtgcaggggtgttcactgctggcctccgcagtccccaccacagccagaac

SEQ ID NO: 579 - RNA, 142 nt, synthetic construct
  misc_feature 1..142: note = Description of Artificial Sequence: Synthetic polynucleotide
  source 1..142: mol_type = other RNA
ggaaggttctggctgtggtggttttagagctagaaatagcaagttaaaataaggctagtccgttatcaacttgaaaaagtggcaccgagtcggtgcgggtgttcactgctggcctccgcagtccccaccacagccttttttt

SEQ ID NO: 580 - RNA, 142 nt, synthetic construct
  misc_feature 1..142: note = Description of Artificial Sequence: Synthetic polynucleotide
  source 1..142: mol_type = other RNA
ggaaggttctggctgtggtggttttagagctagaaatagcaagttaaaataaggctagtccgttatcaacttgaaaaagtggcaccgagtcggtgccccaaggggtgttcactgctggcctccgcagtccccaccacagcca

SEQ ID NO: 581 - RNA, 142 nt, synthetic construct
  misc_feature 1..142: note = Description of Artificial Sequence: Synthetic polynucleotide
  source 1..142: mol_type = other RNA
ggaaggttctggctgtggtggttttagagctagaaatagcaagttaaaataaggctagtccgttatcaacttgaaaaagtggcaccgagtcggtgcgggtgttcactgctggcctccgcagtccccaccacagccagaacct

SEQ ID NO: 582 - RNA, 142 nt, synthetic construct
  misc_feature 1..142: note = Description of Artificial Sequence: Synthetic polynucleotide
  source 1..142: mol_type = other RNA
ggaaggttctggctgtggtggttttagagctagaaatagcaagttaaaataaggctagtccgttatcaacttgaaaaagtggcaccgagtcggtgcgcccaaggggtgttcactgctggcctccgcagtccccaccacagcc

SEQ ID NO: 583 - RNA, 142 nt, synthetic construct
  misc_feature 1..142: note = Description of Artificial Sequence: Synthetic polynucleotide
  source 1..142: mol_type = other RNA
ggaaggttctggctgtggtggttttagagctagaaatagcaagttaaaataaggctagtccgttatcaacttgaaaaagtggcaccgagtcggtgcggggtgttcactgctggcctccgcagtccccaccacagccagaacc

SEQ ID NO: 584 - RNA, 143 nt, synthetic construct
  misc_feature 1..143: note = Description of Artificial Sequence: Synthetic polynucleotide
  source 1..143: mol_type = other RNA
ggaaggttctggctgtggtggttttagagctagaaatagcaagttaaaataaggctagtccgttatcaacttgaaaaagtggcaccgagtcggtgcggggtgttcactgctggcctccgcagtccccaccacagccagaacct

SEQ ID NO: 585 - RNA, 143 nt, synthetic construct
  misc_feature 1..143: note = Description of Artificial Sequence: Synthetic polynucleotide
  source 1..143: mol_type = other RNA
ggaaggttctggctgtggtggttttagagctagaaatagcaagttaaaataaggctagtccgttatcaacttgaaaaagtggcaccgagtcggtgcaaggggtgttcactgctggcctccgcagtccccaccacagccagaac

SEQ ID NO: 586 - RNA, 143 nt, synthetic construct
  misc_feature 1..143: note = Description of Artificial Sequence: Synthetic polynucleotide
  source 1..143: mol_type = other RNA
ggaaggttctggctgtggtggttttagagctagaaatagcaagttaaaataaggctagtccgttatcaacttgaaaaagtggcaccgagtcggtgcaggggtgttcactgctggcctccgcagtccccaccacagccagaacc

SEQ ID NO: 587 - RNA, 143 nt, synthetic construct
  misc_feature 1..143: note = Description of Artificial Sequence: Synthetic polynucleotide
  source 1..143: mol_type = other RNA
ggaaggttctggctgtggtggttttagagctagaaatagcaagttaaaataaggctagtccgttatcaacttgaaaaagtggcaccgagtcggtgcgggtgttcactgctggcctccgcagtccccaccacagccattttttt

SEQ ID NO: 588 - RNA, 143 nt, synthetic construct
  misc_feature 1..143: note = Description of Artificial Sequence: Synthetic polynucleotide
  source 1..143: mol_type = other RNA
ggaaggttctggctgtggtggttttagagctagaaatagcaagttaaaataaggctagtccgttatcaacttgaaaaagtggcaccgagtcggtgcgcccaaggggtgttcactgctggcctccgcagtccccaccacagcca

SEQ ID NO: 589 - RNA, 143 nt, synthetic construct
  misc_feature 1..143: note = Description of Artificial Sequence: Synthetic polynucleotide
  source 1..143: mol_type = other RNA
ggaaggttctggctgtggtggttttagagctagaaatagcaagttaaaataaggctagtccgttatcaacttgaaaaagtggcaccgagtcggtgcggtgttcactgctggcctccgcagtccccaccacagccagttttttt

SEQ ID NO: 590 - RNA, 143 nt, synthetic construct
  misc_feature 1..143: note = Description of Artificial Sequence: Synthetic polynucleotide
  source 1..143: mol_type = other RNA
ggaaggttctggctgtggtggttttagagctagaaatagcaagttaaaataaggctagtccgttatcaacttgaaaaagtggcaccgagtcggtgcggggtgttcactgctggcctccgcagtccccaccacagccttttttt

SEQ ID NO: 591 - RNA, 144 nt, synthetic construct
  misc_feature 1..144: note = Description of Artificial Sequence: Synthetic polynucleotide
  source 1..144: mol_type = other RNA
ggaaggttctggctgtggtggttttagagctagaaatagcaagttaaaataaggctagtccgttatcaacttgaaaaagtggcaccgagtcggtgcggtgttcactgctggcctccgcagtccccaccacagccagattttttt

SEQ ID NO: 592 - RNA, 144 nt, synthetic construct
  misc_feature 1..144: note = Description of Artificial Sequence: Synthetic polynucleotide
  source 1..144: mol_type = other RNA
ggaaggttctggctgtggtggttttagagctagaaatagcaagttaaaataaggctagtccgttatcaacttgaaaaagtggcaccgagtcggtgcaaggggtgttcactgctggcctccgcagtccccaccacagccagaacc

SEQ ID NO: 593 - RNA, 144 nt, synthetic construct
  misc_feature 1..144: note = Description of Artificial Sequence: Synthetic polynucleotide
  source 1..144: mol_type = other RNA
ggaaggttctggctgtggtggttttagagctagaaatagcaagttaaaataaggctagtccgttatcaacttgaaaaagtggcaccgagtcggtgcaggggtgttcactgctggcctccgcagtccccaccacagccagaacct

SEQ ID NO: 594 - RNA, 144 nt, synthetic construct
  misc_feature 1..144: note = Description of Artificial Sequence: Synthetic polynucleotide
  source 1..144: mol_type = other RNA
ggaaggttctggctgtggtggttttagagctagaaatagcaagttaaaataaggctagtccgttatcaacttgaaaaagtggcaccgagtcggtgcgcccaaggggtgttcactgctggcctccgcagtccccaccacagccag

SEQ ID NO: 595 - RNA, 144 nt, synthetic construct
  misc_feature 1..144: note = Description of Artificial Sequence: Synthetic polynucleotide
  source 1..144: mol_type = other RNA
ggaaggttctggctgtggtggttttagagctagaaatagcaagttaaaataaggctagtccgttatcaacttgaaaaagtggcaccgagtcggtgcaggggtgttcactgctggcctccgcagtccccaccacagccttttttt

SEQ ID NO: 596 - RNA, 144 nt, synthetic construct
  misc_feature 1..144: note = Description of Artificial Sequence: Synthetic polynucleotide
  source 1..144: mol_type = other RNA
ggaaggttctggctgtggtggttttagagctagaaatagcaagttaaaataaggctagtccgttatcaacttgaaaaagtggcaccgagtcggtgcggggtgttcactgctggcctccgcagtccccaccacagccattttttt

SEQ ID NO: 597 - RNA, 144 nt, synthetic construct
  misc_feature 1..144: note = Description of Artificial Sequence: Synthetic polynucleotide
  source 1..144: mol_type = other RNA
ggaaggttctggctgtggtggttttagagctagaaatagcaagttaaaataaggctagtccgttatcaacttgaaaaagtggcaccgagtcggtgccgcccaaggggtgttcactgctggcctccgcagtccccaccacagcca

SEQ ID NO: 598 - RNA, 144 nt, synthetic construct
  misc_feature 1..144: note = Description of Artificial Sequence: Synthetic polynucleotide
  source 1..144: mol_type = other RNA
ggaaggttctggctgtggtggttttagagctagaaatagcaagttaaaataaggctagtccgttatcaacttgaaaaagtggcaccgagtcggtgccaaggggtgttcactgctggcctccgcagtccccaccacagccagaac

SEQ ID NO: 599 - RNA, 144 nt, synthetic construct
  misc_feature 1..144: note = Description of Artificial Sequence: Synthetic polynucleotide
  source 1..144: mol_type = other RNA
ggaaggttctggctgtggtggttttagagctagaaatagcaagttaaaataaggctagtccgttatcaacttgaaaaagtggcaccgagtcggtgcgggtgttcactgctggcctccgcagtccccaccacagccagttttttt

SEQ ID NO: 600 - RNA, 145 nt, synthetic construct
  misc_feature 1..145: note = Description of Artificial Sequence: Synthetic polynucleotide
  source 1..145: mol_type = other RNA
ggaaggttctggctgtggtggttttagagctagaaatagcaagttaaaataaggctagtccgttatcaacttgaaaaagtggcaccgagtcggtgcaaggggtgttcactgctggcctccgcagtccccaccacagccagaacct

SEQ ID NO: 601 - RNA, 145 nt, synthetic construct
  misc_feature 1..145: note = Description of Artificial Sequence: Synthetic polynucleotide
  source 1..145: mol_type = other RNA
ggaaggttctggctgtggtggttttagagctagaaatagcaagttaaaataaggctagtccgttatcaacttgaaaaagtggcaccgagtcggtgcgcccaaggggtgttcactgctggcctccgcagtccccaccacagccaga

SEQ ID NO: 602 - RNA, 145 nt, synthetic construct
  misc_feature 1..145: note = Description of Artificial Sequence: Synthetic polynucleotide
  source 1..145: mol_type = other RNA
ggaaggttctggctgtggtggttttagagctagaaatagcaagttaaaataaggctagtccgttatcaacttgaaaaagtggcaccgagtcggtgcaaggggtgttcactgctggcctccgcagtccccaccacagccttttttt

SEQ ID NO: 603 - RNA, 145 nt, synthetic construct
  misc_feature 1..145: note = Description of Artificial Sequence: Synthetic polynucleotide
  source 1..145: mol_type = other RNA
ggaaggttctggctgtggtggttttagagctagaaatagcaagttaaaataaggctagtccgttatcaacttgaaaaagtggcaccgagtcggtgcgggtgttcactgctggcctccgcagtccccaccacagccagattttttt

SEQ ID NO: 604 - RNA, 145 nt, synthetic construct
  misc_feature 1..145: note = Description of Artificial Sequence: Synthetic polynucleotide
  source 1..145: mol_type = other RNA
ggaaggttctggctgtggtggttttagagctagaaatagcaagttaaaataaggctagtccgttatcaacttgaaaaagtggcaccgagtcggtgcggtgttcactgctggcctccgcagtccccaccacagccagaattttttt

SEQ ID NO: 605 - RNA, 145 nt, synthetic construct
  misc_feature 1..145: note = Description of Artificial Sequence: Synthetic polynucleotide
  source 1..145: mol_type = other RNA
ggaaggttctggctgtggtggttttagagctagaaatagcaagttaaaataaggctagtccgttatcaacttgaaaaagtggcaccgagtcggtgcaggggtgttcactgctggcctccgcagtccccaccacagccattttttt

SEQ ID NO: 606 - RNA, 145 nt, synthetic construct
  misc_feature 1..145: note = Description of Artificial Sequence: Synthetic polynucleotide
  source 1..145: mol_type = other RNA
ggaaggttctggctgtggtggttttagagctagaaatagcaagttaaaataaggctagtccgttatcaacttgaaaaagtggcaccgagtcggtgcggggtgttcactgctggcctccgcagtccccaccacagccagttttttt

SEQ ID NO: 607 - RNA, 146 nt, synthetic construct
  misc_feature 1..146: note = Description of Artificial Sequence: Synthetic polynucleotide
  source 1..146: mol_type = other RNA
ggaaggttctggctgtggtggttttagagctagaaatagcaagttaaaataaggctagtccgttatcaacttgaaaaagtggcaccgagtcggtgcggtgttcactgctggcctccgcagtccccaccacagccagaacttttttt

SEQ ID NO: 608 - RNA, 146 nt, synthetic construct
  misc_feature 1..146: note = Description of Artificial Sequence: Synthetic polynucleotide
  source 1..146: mol_type = other RNA
ggaaggttctggctgtggtggttttagagctagaaatagcaagttaaaataaggctagtccgttatcaacttgaaaaagtggcaccgagtcggtgccccaaggggtgttcactgctggcctccgcagtccccaccacagccagaac

SEQ ID NO: 609 - RNA, 146 nt, synthetic construct
  misc_feature 1..146: note = Description of Artificial Sequence: Synthetic polynucleotide
  source 1..146: mol_type = other RNA
ggaaggttctggctgtggtggttttagagctagaaatagcaagttaaaataaggctagtccgttatcaacttgaaaaagtggcaccgagtcggtgcgcccaaggggtgttcactgctggcctccgcagtccccaccacagccagaa

SEQ ID NO: 610 - RNA, 146 nt, synthetic construct
  misc_feature 1..146: note = Description of Artificial Sequence: Synthetic polynucleotide
  source 1..146: mol_type = other RNA
ggaaggttctggctgtggtggttttagagctagaaatagcaagttaaaataaggctagtccgttatcaacttgaaaaagtggcaccgagtcggtgcaaggggtgttcactgctggcctccgcagtccccaccacagccattttttt

SEQ ID NO: 611 - RNA, 146 nt, synthetic construct
  misc_feature 1..146: note = Description of Artificial Sequence: Synthetic polynucleotide
  source 1..146: mol_type = other RNA
ggaaggttctggctgtggtggttttagagctagaaatagcaagttaaaataaggctagtccgttatcaacttgaaaaagtggcaccgagtcggtgcaggggtgttcactgctggcctccgcagtccccaccacagccagttttttt

SEQ ID NO: 612 - RNA, 146 nt, synthetic construct
  misc_feature 1..146: note = Description of Artificial Sequence: Synthetic polynucleotide
  source 1..146: mol_type = other RNA
ggaaggttctggctgtggtggttttagagctagaaatagcaagttaaaataaggctagtccgttatcaacttgaaaaagtggcaccgagtcggtgccacgcccaaggggtgttcactgctggcctccgcagtccccaccacagcca

SEQ ID NO: 613 - RNA, 146 nt, synthetic construct
  misc_feature 1..146: note = Description of Artificial Sequence: Synthetic polynucleotide
  source 1..146: mol_type = other RNA
ggaaggttctggctgtggtggttttagagctagaaatagcaagttaaaataaggctagtccgttatcaacttgaaaaagtggcaccgagtcggtgcggggtgttcactgctggcctccgcagtccccaccacagccagattttttt

SEQ ID NO: 614 - RNA, 146 nt, synthetic construct
  misc_feature 1..146: note = Description of Artificial Sequence: Synthetic polynucleotide
  source 1..146: mol_type = other RNA
ggaaggttctggctgtggtggttttagagctagaaatagcaagttaaaataaggctagtccgttatcaacttgaaaaagtggcaccgagtcggtgcgggtgttcactgctggcctccgcagtccccaccacagccagaattttttt

SEQ ID NO: 615 - RNA, 147 nt, synthetic construct
  misc_feature 1..147: note = Description of Artificial Sequence: Synthetic polynucleotide
  source 1..147: mol_type = other RNA
ggaaggttctggctgtggtggttttagagctagaaatagcaagttaaaataaggctagtccgttatcaacttgaaaaagtggcaccgagtcggtgcaaggggtgttcactgctggcctccgcagtccccaccacagccagttttttt

SEQ ID NO: 616 - RNA, 147 nt, synthetic construct
  misc_feature 1..147: note = Description of Artificial Sequence: Synthetic polynucleotide
  source 1..147: mol_type = other RNA
ggaaggttctggctgtggtggttttagagctagaaatagcaagttaaaataaggctagtccgttatcaacttgaaaaagtggcaccgagtcggtgcgggtgttcactgctggcctccgcagtccccaccacagccagaacttttttt

SEQ ID NO: 617 - RNA, 147 nt, synthetic construct
  misc_feature 1..147: note = Description of Artificial Sequence: Synthetic polynucleotide
  source 1..147: mol_type = other RNA
ggaaggttctggctgtggtggttttagagctagaaatagcaagttaaaataaggctagtccgttatcaacttgaaaaagtggcaccgagtcggtgcaggggtgttcactgctggcctccgcagtccccaccacagccagattttttt

SEQ ID NO: 618 - RNA, 147 nt, synthetic construct
  misc_feature 1..147: note = Description of Artificial Sequence: Synthetic polynucleotide
  source 1..147: mol_type = other RNA
ggaaggttctggctgtggtggttttagagctagaaatagcaagttaaaataaggctagtccgttatcaacttgaaaaagtggcaccgagtcggtgcggggtgttcactgctggcctccgcagtccccaccacagccagaattttttt

SEQ ID NO: 619 - RNA, 147 nt, synthetic construct
  misc_feature 1..147: note = Description of Artificial Sequence: Synthetic polynucleotide
  source 1..147: mol_type = other RNA
ggaaggttctggctgtggtggttttagagctagaaatagcaagttaaaataaggctagtccgttatcaacttgaaaaagtggcaccgagtcggtgcggtgttcactgctggcctccgcagtccccaccacagccagaaccttttttt

SEQ ID NO: 620 - RNA, 147 nt, synthetic construct
  misc_feature 1..147: note = Description of Artificial Sequence: Synthetic polynucleotide
  source 1..147: mol_type = other RNA
ggaaggttctggctgtggtggttttagagctagaaatagcaagttaaaataaggctagtccgttatcaacttgaaaaagtggcaccgagtcggtgcgcccaaggggtgttcactgctggcctccgcagtccccaccacagccagaac

SEQ ID NO: 621 - RNA, 148 nt, synthetic construct
  misc_feature 1..148: note = Description of Artificial Sequence: Synthetic polynucleotide
  source 1..148: mol_type = other RNA
ggaaggttctggctgtggtggttttagagctagaaatagcaagttaaaataaggctagtccgttatcaacttgaaaaagtggcaccgagtcggtgcgccacgcccaaggggtgttcactgctggcctccgcagtccccaccacagcca

SEQ ID NO: 622 - RNA, 148 nt, synthetic construct
  misc_feature 1..148: note = Description of Artificial Sequence: Synthetic polynucleotide
  source 1..148: mol_type = other RNA
ggaaggttctggctgtggtggttttagagctagaaatagcaagttaaaataaggctagtccgttatcaacttgaaaaagtggcaccgagtcggtgcggggtgttcactgctggcctccgcagtccccaccacagccagaacttttttt

SEQ ID NO: 623 - RNA, 148 nt, synthetic construct
  misc_feature 1..148: note = Description of Artificial Sequence: Synthetic polynucleotide
  source 1..148: mol_type = other RNA
ggaaggttctggctgtggtggttttagagctagaaatagcaagttaaaataaggctagtccgttatcaacttgaaaaagtggcaccgagtcggtgcaaggggtgttcactgctggcctccgcagtccccaccacagccagattttttt

SEQ ID NO: 624 - RNA, 148 nt, synthetic construct
  misc_feature 1..148: note = Description of Artificial Sequence: Synthetic polynucleotide
  source 1..148: mol_type = other RNA
ggaaggttctggctgtggtggttttagagctagaaatagcaagttaaaataaggctagtccgttatcaacttgaaaaagtggcaccgagtcggtgcaggggtgttcactgctggcctccgcagtccccaccacagccagaattttttt

SEQ ID NO: 625 - RNA, 148 nt, synthetic construct
  misc_feature 1..148: note = Description of Artificial Sequence: Synthetic polynucleotide
  source 1..148: mol_type = other RNA
ggaaggttctggctgtggtggttttagagctagaaatagcaagttaaaataaggctagtccgttatcaacttgaaaaagtggcaccgagtcggtgcgggtgttcactgctggcctccgcagtccccaccacagccagaaccttttttt

SEQ ID NO: 626 - RNA, 148 nt, synthetic construct
  misc_feature 1..148: note = Description of Artificial Sequence: Synthetic polynucleotide
  source 1..148: mol_type = other RNA
ggaaggttctggctgtggtggttttagagctagaaatagcaagttaaaataaggctagtccgttatcaacttgaaaaagtggcaccgagtcggtgcggtgttcactgctggcctccgcagtccccaccacagccagaacctttttttt

SEQ ID NO: 627 - RNA, 148 nt, synthetic construct
  misc_feature 1..148: note = Description of Artificial Sequence: Synthetic polynucleotide
  source 1..148: mol_type = other RNA
ggaaggttctggctgtggtggttttagagctagaaatagcaagttaaaataaggctagtccgttatcaacttgaaaaagtggcaccgagtcggtgcgcccaaggggtgttcactgctggcctccgcagtccccaccacagccagaacc

SEQ ID NO: 628 - RNA, 148 nt, synthetic construct
  misc_feature 1..148: note = Description of Artificial Sequence: Synthetic polynucleotide
  source 1..148: mol_type = other RNA
ggaaggttctggctgtggtggttttagagctagaaatagcaagttaaaataaggctagtccgttatcaacttgaaaaagtggcaccgagtcggtgccgcccaaggggtgttcactgctggcctccgcagtccccaccacagccagaac

SEQ ID NO: 629 - RNA, 149 nt, synthetic construct
  misc_feature 1..149: note = Description of Artificial Sequence: Synthetic polynucleotide
  source 1..149: mol_type = other RNA
ggaaggttctggctgtggtggttttagagctagaaatagcaagttaaaataaggctagtccgttatcaacttgaaaaagtggcaccgagtcggtgcgggtgttcactgctggcctccgcagtccccaccacagccagaacctttttttt

SEQ ID NO: 630 - RNA, 149 nt, synthetic construct
  misc_feature 1..149: note = Description of Artificial Sequence: Synthetic polynucleotide
  source 1..149: mol_type = other RNA
ggaaggttctggctgtggtggttttagagctagaaatagcaagttaaaataaggctagtccgttatcaacttgaaaaagtggcaccgagtcggtgcaggggtgttcactgctggcctccgcagtccccaccacagccagaacttttttt

SEQ ID NO: 631 - RNA, 149 nt, synthetic construct
  misc_feature 1..149: note = Description of Artificial Sequence: Synthetic polynucleotide
  source 1..149: mol_type = other RNA
ggaaggttctggctgtggtggttttagagctagaaatagcaagttaaaataaggctagtccgttatcaacttgaaaaagtggcaccgagtcggtgcgcccaaggggtgttcactgctggcctccgcagtccccaccacagccagaacct

SEQ ID NO: 632 - RNA, 149 nt, synthetic construct
  misc_feature 1..149: note = Description of Artificial Sequence: Synthetic polynucleotide
  source 1..149: mol_type = other RNA
ggaaggttctggctgtggtggttttagagctagaaatagcaagttaaaataaggctagtccgttatcaacttgaaaaagtggcaccgagtcggtgcggggtgttcactgctggcctccgcagtccccaccacagccagaaccttttttt

SEQ ID NO: 633 - RNA, 149 nt, synthetic construct
  misc_feature 1..149: note = Description of Artificial Sequence: Synthetic polynucleotide
  source 1..149: mol_type = other RNA
ggaaggttctggctgtggtggttttagagctagaaatagcaagttaaaataaggctagtccgttatcaacttgaaaaagtggcaccgagtcggtgcgcccaaggggtgttcactgctggcctccgcagtccccaccacagccttttttt

SEQ ID NO: 634 - RNA, 149 nt, synthetic construct
  misc_feature 1..149: note = Description of Artificial Sequence: Synthetic polynucleotide
  source 1..149: mol_type = other RNA
ggaaggttctggctgtggtggttttagagctagaaatagcaagttaaaataaggctagtccgttatcaacttgaaaaagtggcaccgagtcggtgcaaggggtgttcactgctggcctccgcagtccccaccacagccagaattttttt

SEQ ID NO: 635 - RNA, 150 nt, synthetic construct
  misc_feature 1..150: note = Description of Artificial Sequence: Synthetic polynucleotide
  source 1..150: mol_type = other RNA
ggaaggttctggctgtggtggttttagagctagaaatagcaagttaaaataaggctagtccgttatcaacttgaaaaagtggcaccgagtcggtgcgcccaaggggtgttcactgctggcctccgcagtccccaccacagccattttttt

SEQ ID NO: 636 - RNA, 150 nt, synthetic construct
  misc_feature 1..150: note = Description of Artificial Sequence: Synthetic polynucleotide
  source 1..150: mol_type = other RNA
ggaaggttctggctgtggtggttttagagctagaaatagcaagttaaaataaggctagtccgttatcaacttgaaaaagtggcaccgagtcggtgcaggggtgttcactgctggcctccgcagtccccaccacagccagaaccttttttt

SEQ ID NO: 637 - RNA, 150 nt, synthetic construct
  misc_feature 1..150: note = Description of Artificial Sequence: Synthetic polynucleotide
  source 1..150: mol_type = other RNA
ggaaggttctggctgtggtggttttagagctagaaatagcaagttaaaataaggctagtccgttatcaacttgaaaaagtggcaccgagtcggtgcggggtgttcactgctggcctccgcagtccccaccacagccagaacctttttttt

SEQ ID NO: 638 - RNA, 150 nt, synthetic construct
  misc_feature 1..150: note = Description of Artificial Sequence: Synthetic polynucleotide
  source 1..150: mol_type = other RNA
ggaaggttctggctgtggtggttttagagctagaaatagcaagttaaaataaggctagtccgttatcaacttgaaaaagtggcaccgagtcggtgcaaggggtgttcactgctggcctccgcagtccccaccacagccagaacttttttt

SEQ ID NO: 639 - RNA, 150 nt, synthetic construct
  misc_feature 1..150: note = Description of Artificial Sequence: Synthetic polynucleotide
  source 1..150: mol_type = other RNA
ggaaggttctggctgtggtggttttagagctagaaatagcaagttaaaataaggctagtccgttatcaacttgaaaaagtggcaccgagtcggtgcctgccacgcccaaggggtgttcactgctggcctccgcagtccccaccacagcca

SEQ ID NO: 640 - RNA, 150 nt, synthetic construct
  misc_feature 1..150: note = Description of Artificial Sequence: Synthetic polynucleotide
  source 1..150: mol_type = other RNA
ggaaggttctggctgtggtggttttagagctagaaatagcaagttaaaataaggctagtccgttatcaacttgaaaaagtggcaccgagtcggtgccacgcccaaggggtgttcactgctggcctccgcagtccccaccacagccagaac

SEQ ID NO: 641 - RNA, 151 nt, synthetic construct
  misc_feature 1..151: note = Description of Artificial Sequence: Synthetic polynucleotide
  source 1..151: mol_type = other RNA
ggaaggttctggctgtggtggttttagagctagaaatagcaagttaaaataaggctagtccgttatcaacttgaaaaagtggcaccgagtcggtgcaggggtgttcactgctggcctccgcagtccccaccacagccagaacctttttttt

SEQ ID NO: 642 - RNA, 151 nt, synthetic construct
  misc_feature 1..151: note = Description of Artificial Sequence: Synthetic polynucleotide
  source 1..151: mol_type = other RNA
ggaaggttctggctgtggtggttttagagctagaaatagcaagttaaaataaggctagtccgttatcaacttgaaaaagtggcaccgagtcggtgcaaggggtgttcactgctggcctccgcagtccccaccacagccagaaccttttttt

SEQ ID NO: 643 - RNA, 151 nt, synthetic construct
  misc_feature 1..151: note = Description of Artificial Sequence: Synthetic polynucleotide
  source 1..151: mol_type = other RNA
ggaaggttctggctgtggtggttttagagctagaaatagcaagttaaaataaggctagtccgttatcaacttgaaaaagtggcaccgagtcggtgcgcccaaggggtgttcactgctggcctccgcagtccccaccacagccagttttttt

SEQ ID NO: 644 - RNA, 152 nt, synthetic construct
  misc_feature 1..152: note = Description of Artificial Sequence: Synthetic polynucleotide
  source 1..152: mol_type = other RNA
ggaaggttctggctgtggtggttttagagctagaaatagcaagttaaaataaggctagtccgttatcaacttgaaaaagtggcaccgagtcggtgcgactgccacgcccaaggggtgttcactgctggcctccgcagtccccaccacagcca

SEQ ID NO: 645 - RNA, 152 nt, synthetic construct
  misc_feature 1..152: note = Description of Artificial Sequence: Synthetic polynucleotide
  source 1..152: mol_type = other RNA
ggaaggttctggctgtggtggttttagagctagaaatagcaagttaaaataaggctagtccgttatcaacttgaaaaagtggcaccgagtcggtgcgcccaaggggtgttcactgctggcctccgcagtccccaccacagccagattttttt

SEQ ID NO: 646 - RNA, 152 nt, synthetic construct
  misc_feature 1..152: note = Description of Artificial Sequence: Synthetic polynucleotide
  source 1..152: mol_type = other RNA
ggaaggttctggctgtggtggttttagagctagaaatagcaagttaaaataaggctagtccgttatcaacttgaaaaagtggcaccgagtcggtgcaaggggtgttcactgctggcctccgcagtccccaccacagccagaacctttttttt

SEQ ID NO: 647 - RNA, 152 nt, synthetic construct
  misc_feature 1..152: note = Description of Artificial Sequence: Synthetic polynucleotide
  source 1..152: mol_type = other RNA
ggaaggttctggctgtggtggttttagagctagaaatagcaagttaaaataaggctagtccgttatcaacttgaaaaagtggcaccgagtcggtgcgccacgcccaaggggtgttcactgctggcctccgcagtccccaccacagccagaac

SEQ ID NO: 648 - RNA, 153 nt, synthetic construct
  misc_feature 1..153: note = Description of Artificial Sequence: Synthetic polynucleotide
  source 1..153: mol_type = other RNA
ggaaggttctggctgtggtggttttagagctagaaatagcaagttaaaataaggctagtccgttatcaacttgaaaaagtggcaccgagtcggtgcgcccaaggggtgttcactgctggcctccgcagtccccaccacagccagaattttttt

SEQ ID NO: 649 - RNA, 154 nt, synthetic construct
  misc_feature 1..154: note = Description of Artificial Sequence: Synthetic polynucleotide
  source 1..154: mol_type = other RNA
ggaaggttctggctgtggtggttttagagctagaaatagcaagttaaaataaggctagtccgttatcaacttgaaaaagtggcaccgagtcggtgcgtgactgccacgcccaaggggtgttcactgctggcctccgcagtccccaccacagcca

SEQ ID NO: 650 - RNA, 154 nt, synthetic construct
  misc_feature 1..154: note = Description of Artificial Sequence: Synthetic polynucleotide
  source 1..154: mol_type = other RNA
ggaaggttctggctgtggtggttttagagctagaaatagcaagttaaaataaggctagtccgttatcaacttgaaaaagtggcaccgagtcggtgcctgccacgcccaaggggtgttcactgctggcctccgcagtccccaccacagccagaac

SEQ ID NO: 651 - RNA, 154 nt, synthetic construct
  misc_feature 1..154: note = Description of Artificial Sequence: Synthetic polynucleotide
  source 1..154: mol_type = other RNA
ggaaggttctggctgtggtggttttagagctagaaatagcaagttaaaataaggctagtccgttatcaacttgaaaaagtggcaccgagtcggtgcgcccaaggggtgttcactgctggcctccgcagtccccaccacagccagaacttttttt

SEQ ID NO: 652 - RNA, 155 nt, synthetic construct
  misc_feature 1..155: note = Description of Artificial Sequence: Synthetic polynucleotide
  source 1..155: mol_type = other RNA
ggaaggttctggctgtggtggttttagagctagaaatagcaagttaaaataaggctagtccgttatcaacttgaaaaagtggcaccgagtcggtgcgcccaaggggtgttcactgctggcctccgcagtccccaccacagccagaaccttttttt

SEQ ID NO: 653 - RNA, 156 nt, synthetic construct
  misc_feature 1..156: note = Description of Artificial Sequence: Synthetic polynucleotide
  source 1..156: mol_type = other RNA
ggaaggttctggctgtggtggttttagagctagaaatagcaagttaaaataaggctagtccgttatcaacttgaaaaagtggcaccgagtcggtgcgcccaaggggtgttcactgctggcctccgcagtccccaccacagccagaacctttttttt

SEQ ID NO: 654 - RNA, 156 nt, synthetic construct
  misc_feature 1..156: note = Description of Artificial Sequence: Synthetic polynucleotide
  source 1..156: mol_type = other RNA
ggaaggttctggctgtggtggttttagagctagaaatagcaagttaaaataaggctagtccgttatcaacttgaaaaagtggcaccgagtcggtgcgactgccacgcccaaggggtgttcactgctggcctccgcagtccccaccacagccagaac

SEQ ID NO: 655 - RNA, 156 nt, synthetic construct
  misc_feature 1..156: note = Description of Artificial Sequence: Synthetic polynucleotide
  source 1..156: mol_type = other RNA
ggaaggttctggctgtggtggttttagagctagaaatagcaagttaaaataaggctagtccgttatcaacttgaaaaagtggcaccgagtcggtgctggtgactgccacgcccaaggggtgttcactgctggcctccgcagtccccaccacagcca

SEQ ID NO: 656 - RNA, 158 nt, synthetic construct
  misc_feature 1..158: note = Description of Artificial Sequence: Synthetic polynucleotide
  source 1..158: mol_type = other RNA
ggaaggttctggctgtggtggttttagagctagaaatagcaagttaaaataaggctagtccgttatcaacttgaaaaagtggcaccgagtcggtgcgtgactgccacgcccaaggggtgttcactgctggcctccgcagtccccaccacagccagaac

SEQ ID NO: 657 - RNA, 158 nt, synthetic construct
  misc_feature 1..158: note = Description of Artificial Sequence: Synthetic polynucleotide
  source 1..158: mol_type = other RNA
ggaaggttctggctgtggtggttttagagctagaaatagcaagttaaaataaggctagtccgttatcaacttgaaaaagtggcaccgagtcggtgctttggtgactgccacgcccaaggggtgttcactgctggcctccgcagtccccaccacagcca

SEQ ID NO: 658 - RNA, 160 nt, synthetic construct
  misc_feature 1..160: note = Description of Artificial Sequence: Synthetic polynucleotide
  source 1..160: mol_type = other RNA
ggaaggttctggctgtggtggttttagagctagaaatagcaagttaaaataaggctagtccgttatcaacttgaaaaagtggcaccgagtcggtgctatttggtgactgccacgcccaaggggtgttcactgctggcctccgcagtccccaccacagcca

SEQ ID NO: 659 - RNA, 160 nt, synthetic construct
  misc_feature 1..160: note = Description of Artificial Sequence: Synthetic polynucleotide
  source 1..160: mol_type = other RNA
ggaaggttctggctgtggtggttttagagctagaaatagcaagttaaaataaggctagtccgttatcaacttgaaaaagtggcaccgagtcggtgctggtgactgccacgcccaaggggtgttcactgctggcctccgcagtccccaccacagccagaac

SEQ ID NO: 660 - RNA, 162 nt, synthetic construct
  misc_feature 1..162: note = Description of Artificial Sequence: Synthetic polynucleotide
  source 1..162: mol_type = other RNA
ggaaggttctggctgtggtggttttagagctagaaatagcaagttaaaataaggctagtccgttatcaacttgaaaaagtggcaccgagtcggtgcagtatttggtgactgccacgcccaaggggtgttcactgctggcctccgcagtccccaccacagcca

SEQ ID NO: 661 - RNA, 162 nt, synthetic construct
  misc_feature 1..162: note = Description of Artificial Sequence: Synthetic polynucleotide
  source 1..162: mol_type = other RNA
ggaaggttctggctgtggtggttttagagctagaaatagcaagttaaaataaggctagtccgttatcaacttgaaaaagtggcaccgagtcggtgctttggtgactgccacgcccaaggggtgttcactgctggcctccgcagtccccaccacagccagaac

SEQ ID NO: 662 - RNA, 164 nt, synthetic construct
  misc_feature 1..164: note = Description of Artificial Sequence: Synthetic polynucleotide
  source 1..164: mol_type = other RNA
ggaaggttctggctgtggtggttttagagctagaaatagcaagttaaaataaggctagtccgttatcaacttgaaaaagtggcaccgagtcggtgctatttggtgactgccacgcccaaggggtgttcactgctggcctccgcagtccccaccacagccagaac

SEQ ID NO: 663 - RNA, 164 nt, synthetic construct
  misc_feature 1..164: note = Description of Artificial Sequence: Synthetic polynucleotide
  source 1..164: mol_type = other RNA
ggaaggttctggctgtggtggttttagagctagaaatagcaagttaaaataaggctagtccgttatcaacttgaaaaagtggcaccgagtcggtgcacagtatttggtgactgccacgcccaaggggtgttcactgctggcctccgcagtccccaccacagcca

SEQ ID NO: 664 - RNA, 166 nt, synthetic construct
  misc_feature 1..166: note = Description of Artificial Sequence: Synthetic polynucleotide
  source 1..166: mol_type = other RNA
ggaaggttctggctgtggtggttttagagctagaaatagcaagttaaaataaggctagtccgttatcaacttgaaaaagtggcaccgagtcggtgcagtatttggtgactgccacgcccaaggggtgttcactgctggcctccgcagtccccaccacagccagaac

SEQ ID NO: 665 - RNA, 166 nt, synthetic construct
  misc_feature 1..166: note = Description of Artificial Sequence: Synthetic polynucleotide
  source 1..166: mol_type = other RNA
ggaaggttctggctgtggtggttttagagctagaaatagcaagttaaaataaggctagtccgttatcaacttgaaaaagtggcaccgagtcggtgcttacagtatttggtgactgccacgcccaaggggtgttcactgctggcctccgcagtccccaccacagcca

SEQ ID NO: 666 - RNA, 168 nt, synthetic construct
  misc_feature 1..168: note = Description of Artificial Sequence: Synthetic polynucleotide
  source 1..168: mol_type = other RNA
ggaaggttctggctgtggtggttttagagctagaaatagcaagttaaaataaggctagtccgttatcaacttgaaaaagtggcaccgagtcggtgcacagtatttggtgactgccacgcccaaggggtgttcactgctggcctccgcagtccccaccacagccagaac

SEQ ID NO: 667 - RNA, 168 nt, synthetic construct
  misc_feature 1..168: note = Description of Artificial Sequence: Synthetic polynucleotide
  source 1..168: mol_type = other RNA
ggaaggttctggctgtggtggttttagagctagaaatagcaagttaaaataaggctagtccgttatcaacttgaaaaagtggcaccgagtcggtgcctttacagtatttggtgactgccacgcccaaggggtgttcactgctggcctccgcagtccccaccacagcca

SEQ ID NO: 668 - RNA, 170 nt, synthetic construct
  misc_feature 1..170: note = Description of Artificial Sequence: Synthetic polynucleotide
  source 1..170: mol_type = other RNA
ggaaggttctggctgtggtggttttagagctagaaatagcaagttaaaataaggctagtccgttatcaacttgaaaaagtggcaccgagtcggtgcctctttacagtatttggtgactgccacgcccaaggggtgttcactgctggcctccgcagtccccaccacagcca

SEQ ID NO: 669 - RNA, 170 nt, synthetic construct
  misc_feature 1..170: note = Description of Artificial Sequence: Synthetic polynucleotide
  source 1..170: mol_type = other RNA
ggaaggttctggctgtggtggttttagagctagaaatagcaagttaaaataaggctagtccgttatcaacttgaaaaagtggcaccgagtcggtgcttacagtatttggtgactgccacgcccaaggggtgttcactgctggcctccgcagtccccaccacagccagaac

SEQ ID NO: 670 - RNA, 172 nt, synthetic construct
  misc_feature 1..172: note = Description of Artificial Sequence: Synthetic polynucleotide
  source 1..172: mol_type = other RNA
ggaaggttctggctgtggtggttttagagctagaaatagcaagttaaaataaggctagtccgttatcaacttgaaaaagtggcaccgagtcggtgcacctctttacagtatttggtgactgccacgcccaaggggtgttcactgctggcctccgcagtccccaccacagcca

SEQ ID NO: 671 - RNA, 172 nt, synthetic construct
  misc_feature 1..172: note = Description of Artificial Sequence: Synthetic polynucleotide
  source 1..172: mol_type = other RNA
ggaaggttctggctgtggtggttttagagctagaaatagcaagttaaaataaggctagtccgttatcaacttgaaaaagtggcaccgagtcggtgcctttacagtatttggtgactgccacgcccaaggggtgttcactgctggcctccgcagtccccaccacagccagaac

SEQ ID NO: 672 - RNA, 174 nt, synthetic construct
  misc_feature 1..174: note = Description of Artificial Sequence: Synthetic polynucleotide
  source 1..174: mol_type = other RNA
ggaaggttctggctgtggtggttttagagctagaaatagcaagttaaaataaggctagtccgttatcaacttgaaaaagtggcaccgagtcggtgcgtacctctttacagtatttggtgactgccacgcccaaggggtgttcactgctggcctccgcagtccccaccacagcca

SEQ ID NO: 673 - RNA, 174 nt, synthetic construct
  misc_feature 1..174: note = Description of Artificial Sequence: Synthetic polynucleotide
  source 1..174: mol_type = other RNA
ggaaggttctggctgtggtggttttagagctagaaatagcaagttaaaataaggctagtccgttatcaacttgaaaaagtggcaccgagtcggtgcctctttacagtatttggtgactgccacgcccaaggggtgttcactgctggcctccgcagtccccaccacagccagaac

SEQ ID NO: 674 - RNA, 176 nt, synthetic construct
  misc_feature 1..176: note = Description of Artificial Sequence: Synthetic polynucleotide
  source 1..176: mol_type = other RNA
ggaaggttctggctgtggtggttttagagctagaaatagcaagttaaaataaggctagtccgttatcaacttgaaaaagtggcaccgagtcggtgcacctctttacagtatttggtgactgccacgcccaaggggtgttcactgctggcctccgcagtccccaccacagccagaac

SEQ ID NO: 675 - RNA, 176 nt, synthetic construct
  misc_feature 1..176: note = Description of Artificial Sequence: Synthetic polynucleotide
  source 1..176: mol_type = other RNA
ggaaggttctggctgtggtggttttagagctagaaatagcaagttaaaataaggctagtccgttatcaacttgaaaaagtggcaccgagtcggtgcacgtacctctttacagtatttggtgactgccacgcccaaggggtgttcactgctggcctccgcagtccccaccacagcca

SEQ ID NO: 676 - RNA, 178 nt, synthetic construct
  misc_feature 1..178: note = Description of Artificial Sequence: Synthetic polynucleotide
  source 1..178: mol_type = other RNA
ggaaggttctggctgtggtggttttagagctagaaatagcaagttaaaataaggctagtccgttatcaacttgaaaaagtggcaccgagtcggtgcgtacctctttacagtatttggtgactgccacgcccaaggggtgttcactgctggcctccgcagtccccaccacagccagaac

SEQ ID NO: 677 - RNA, 178 nt, synthetic construct
  misc_feature 1..178: note = Description of Artificial Sequence: Synthetic polynucleotide
  source 1..178: mol_type = other RNA
ggaaggttctggctgtggtggttttagagctagaaatagcaagttaaaataaggctagtccgttatcaacttgaaaaagtggcaccgagtcggtgcccacgtacctctttacagtatttggtgactgccacgcccaaggggtgttcactgctggcctccgcagtccccaccacagcca

SEQ ID NO: 678 - RNA, 180 nt, synthetic construct
  misc_feature 1..180: note = Description of Artificial Sequence: Synthetic polynucleotide
  source 1..180: mol_type = other RNA
ggaaggttctggctgtggtggttttagagctagaaatagcaagttaaaataaggctagtccgttatcaacttgaaaaagtggcaccgagtcggtgcacgtacctctttacagtatttggtgactgccacgcccaaggggtgttcactgctggcctccgcagtccccaccacagccagaac

SEQ ID NO: 679 - RNA, 180 nt, synthetic construct
  misc_feature 1..180: note = Description of Artificial Sequence: Synthetic polynucleotide
  source 1..180: mol_type = other RNA
ggaaggttctggctgtggtggttttagagctagaaatagcaagttaaaataaggctagtccgttatcaacttgaaaaagtggcaccgagtcggtgcgtccacgtacctctttacagtatttggtgactgccacgcccaaggggtgttcactgctggcctccgcagtccccaccacagcca

SEQ ID NO: 680 - RNA, 182 nt, synthetic construct
  misc_feature 1..182: note = Description of Artificial Sequence: Synthetic polynucleotide
  source 1..182: mol_type = other RNA
ggaaggttctggctgtggtggttttagagctagaaatagcaagttaaaataaggctagtccgttatcaacttgaaaaagtggcaccgagtcggtgcccacgtacctctttacagtatttggtgactgccacgcccaaggggtgttcactgctggcctccgcagtccccaccacagccagaac

SEQ ID NO: 681 - RNA, 96 nt, synthetic construct
  misc_feature 1..96: note = Description of Artificial Sequence: Synthetic oligonucleotide
  source 1..96: mol_type = other RNA
ggaataaaagagcattggcggttttagagctagaaatagcaagttaaaataaggctagtccgttatcaacttgaaaaagtggcaccgagtcggtgc

SEQ ID NO: 682 - RNA, 20 nt, synthetic construct
  misc_feature 1..20: note = Description of Artificial Sequence: Synthetic oligonucleotide
  source 1..20: mol_type = other RNA
tctggctgtggtggggactg

SEQ ID NO: 683-685 - skipped (3 entries)

SEQ ID NO: 686 - RNA, 10 nt, synthetic construct
  misc_feature 1..10: note = Description of Artificial Sequence: Synthetic oligonucleotide
  source 1..10: mol_type = other RNA
tccccaccac

SEQ ID NO: 687 - RNA, 11 nt, synthetic construct
  misc_feature 1..11: note = Description of Artificial Sequence: Synthetic oligonucleotide
  source 1..11: mol_type = other RNA
tccccaccaca

SEQ ID NO: 688 - RNA, 12 nt, synthetic construct
  misc_feature 1..12: note = Description of Artificial Sequence: Synthetic oligonucleotide
  source 1..12: mol_type = other RNA
tccccaccacag

SEQ ID NO: 689 - RNA, 13 nt, synthetic construct
  misc_feature 1..13: note = Description of Artificial Sequence: Synthetic oligonucleotide
  source 1..13: mol_type = other RNA
tccccaccacagc

SEQ ID NO: 690 - RNA, 14 nt, synthetic construct
  misc_feature 1..14: note = Description of Artificial Sequence: Synthetic oligonucleotide
  source 1..14: mol_type = other RNA
tccccaccacagcc

SEQ ID NO: 691 - RNA, 15 nt, synthetic construct
  misc_feature 1..15: note = Description of Artificial Sequence: Synthetic oligonucleotide
  source 1..15: mol_type = other RNA
tccccaccacagcca

SEQ ID NO: 692 - RNA, 16 nt, synthetic construct
  misc_feature 1..16: note = Description of Artificial Sequence: Synthetic oligonucleotide
  source 1..16: mol_type = other RNA
tccccaccacagccag

SEQ ID NO: 693 - RNA, 17 nt, synthetic construct
  misc_feature 1..17: note = Description of Artificial Sequence: Synthetic oligonucleotide
  source 1..17: mol_type = other RNA
tccccaccacagccaga

SEQ ID NO: 694 - RNA, 24 nt, synthetic construct
  misc_feature 1..24: note = Description of Artificial Sequence: Synthetic oligonucleotide
  source 1..24: mol_type = other RNA
ggtgttcactgctggcctctgcag

SEQ ID NO: 695 - RNA, 24 nt, synthetic construct
  misc_feature 1..24: note = Description of Artificial Sequence: Synthetic oligonucleotide
  source 1..24: mol_type = other RNA
ggtgttcactgctggcctcggcag

SEQ ID NO: 696 - RNA, 24 nt, synthetic construct
  misc_feature 1..24: note = Description of Artificial Sequence: Synthetic oligonucleotide
  source 1..24: mol_type = other RNA
ggtgttcactgctggcctcagcag

SEQ ID NO: 697 - RNA, 24 nt, synthetic construct
  misc_feature 1..24: note = Description of Artificial Sequence: Synthetic oligonucleotide
  source 1..24: mol_type = other RNA
ggtgttcactgctggcctccgcag

SEQ ID NO: 698 - RNA, 25 nt, synthetic construct
  misc_feature 1..25: note = Description of Artificial Sequence: Synthetic oligonucleotide
  source 1..25: mol_type = other RNA
gggtgttcactgctggcctcggcag

SEQ ID NO: 699 - RNA, 25 nt, synthetic construct
  misc_feature 1..25: note = Description of Artificial Sequence: Synthetic oligonucleotide
  source 1..25: mol_type = other RNA
gggtgttcactgctggcctccgcag

SEQ ID NO: 700 - RNA, 25 nt, synthetic construct
  misc_feature 1..25: note = Description of Artificial Sequence: Synthetic oligonucleotide
  source 1..25: mol_type = other RNA
gggtgttcactgctggcctcagcag

SEQ ID NO: 701 - RNA, 25 nt, synthetic construct
  misc_feature 1..25: note = Description of Artificial Sequence: Synthetic oligonucleotide
  source 1..25: mol_type = other RNA
gggtgttcactgctggcctctgcag

SEQ ID NO: 702 - RNA, 26 nt, synthetic construct
  misc_feature 1..26: note = Description of Artificial Sequence: Synthetic oligonucleotide
  source 1..26: mol_type = other RNA
ggggtgttcactgctggcctccgcag

SEQ ID NO: 703 - RNA, 26 nt, synthetic construct
  misc_feature 1..26: note = Description of Artificial Sequence: Synthetic oligonucleotide
  source 1..26: mol_type = other RNA
ggggtgttcactgctggcctcggcag

SEQ ID NO: 704 - RNA, 26 nt, synthetic construct
  misc_feature 1..26: note = Description of Artificial Sequence: Synthetic oligonucleotide
  source 1..26: mol_type = other RNA
ggggtgttcactgctggcctctgcag

SEQ ID NO: 705 - RNA, 26 nt, synthetic construct
  misc_feature 1..26: note = Description of Artificial Sequence: Synthetic oligonucleotide
  source 1..26: mol_type = other RNA
ggggtgttcactgctggcctcagcag

SEQ ID NO: 706 - RNA, 27 nt, synthetic construct
  misc_feature 1..27: note = Description of Artificial Sequence: Synthetic oligonucleotide
  source 1..27: mol_type = other RNA
aggggtgttcactgctggcctcagcag

SEQ ID NO: 707 - RNA, 27 nt, synthetic construct
  misc_feature 1..27: note = Description of Artificial Sequence: Synthetic oligonucleotide
  source 1..27: mol_type = other RNA
aggggtgttcactgctggcctccgcag

SEQ ID NO: 708 - RNA, 27 nt, synthetic construct
  misc_feature 1..27: note = Description of Artificial Sequence: Synthetic oligonucleotide
  source 1..27: mol_type = other RNA
aggggtgttcactgctggcctctgcag

SEQ ID NO: 709 - RNA, 27 nt, synthetic construct
  misc_feature 1..27: note = Description of Artificial Sequence: Synthetic oligonucleotide
  source 1..27: mol_type = other RNA
aggggtgttcactgctggcctcggcag

SEQ ID NO: 710 - RNA, 28 nt, synthetic construct
  misc_feature 1..28: note = Description of Artificial Sequence: Synthetic oligonucleotide
  source 1..28: mol_type = other RNA
aaggggtgttcactgctggcctcggcag

SEQ ID NO: 711 - RNA, 28 nt, synthetic construct
  misc_feature 1..28: note = Description of Artificial Sequence: Synthetic oligonucleotide
  source 1..28: mol_type = other RNA
aaggggtgttcactgctggcctccgcag

SEQ ID NO: 712 - RNA, 28 nt, synthetic construct
  misc_feature 1..28: note = Description of Artificial Sequence: Synthetic oligonucleotide
  source 1..28: mol_type = other RNA
aaggggtgttcactgctggcctctgcag

SEQ ID NO: 713 - RNA, 28 nt, synthetic construct
  misc_feature 1..28: note = Description of Artificial Sequence: Synthetic oligonucleotide
  source 1..28: mol_type = other RNA
aaggggtgttcactgctggcctcagcag

SEQ ID NO: 714 - RNA, 29 nt, synthetic construct
  misc_feature 1..29: note = Description of Artificial Sequence: Synthetic oligonucleotide
  source 1..29: mol_type = other RNA
caaggggtgttcactgctggcctccgcag

SEQ ID NO: 715 - RNA, 30 nt, synthetic construct
  misc_feature 1..30: note = Description of Artificial Sequence: Synthetic oligonucleotide
  source 1..30: mol_type = other RNA
ccaaggggtgttcactgctggcctccgcag

SEQ ID NO: 716 - RNA, 32 nt, synthetic construct
  misc_feature 1..32: note = Description of Artificial Sequence: Synthetic oligonucleotide
  source 1..32: mol_type = other RNA
gcccaaggggtgttcactgctggcctctgcag

SEQ ID NO: 717 - RNA, 32 nt, synthetic construct
  misc_feature 1..32: note = Description of Artificial Sequence: Synthetic oligonucleotide
  source 1..32: mol_type = other RNA
gcccaaggggtgttcactgctggcctcagcag

SEQ ID NO: 718 - RNA, 32 nt, synthetic construct
  misc_feature 1..32: note = Description of Artificial Sequence: Synthetic oligonucleotide
  source 1..32: mol_type = other RNA
gcccaaggggtgttcactgctggcctcggcag

SEQ ID NO: 719 - RNA, 32 nt, synthetic construct
  misc_feature 1..32: note = Description of Artificial Sequence: Synthetic oligonucleotide
  source 1..32: mol_type = other RNA
gcccaaggggtgttcactgctggcctccgcag

SEQ ID NO: 720 - RNA, 34 nt, synthetic construct
  misc_feature 1..34: note = Description of Artificial Sequence: Synthetic oligonucleotide
  source 1..34: mol_type = other RNA
acgcccaaggggtgttcactgctggcctccgcag

SEQ ID NO: 721 - RNA, 34 nt, synthetic construct
  misc_feature 1..34: note = Description of Artificial Sequence: Synthetic oligonucleotide
  source 1..34: mol_type = other RNA
acgcccaaggggtgttcactgctggcctctgcag

SEQ ID NO: 722 - RNA, 34 nt, synthetic construct
  misc_feature 1..34: note = Description of Artificial Sequence: Synthetic oligonucleotide
  source 1..34: mol_type = other RNA
acgcccaaggggtgttcactgctggcctcagcag

SEQ ID NO: 723 - RNA, 34 nt, synthetic construct
  misc_feature 1..34: note = Description of Artificial Sequence: Synthetic oligonucleotide
  source 1..34: mol_type = other RNA
acgcccaaggggtgttcactgctggcctcggcag

SEQ ID NO: 724 - RNA, 37 nt, synthetic construct
  misc_feature 1..37: note = Description of Artificial Sequence: Synthetic oligonucleotide
  source 1..37: mol_type = other RNA
gccacgcccaaggggtgttcactgctggcctccgcag

SEQ ID NO: 725 - RNA, 37 nt, synthetic construct
  misc_feature 1..37: note = Description of Artificial Sequence: Synthetic oligonucleotide
  source 1..37: mol_type = other RNA
gccacgcccaaggggtgttcactgctggcctctgcag

SEQ ID NO: 726 - RNA, 37 nt, synthetic construct
  misc_feature 1..37: note = Description of Artificial Sequence: Synthetic oligonucleotide
  source 1..37: mol_type = other RNA
gccacgcccaaggggtgttcactgctggcctcggcag

SEQ ID NO: 727 - RNA, 37 nt, synthetic construct
  misc_feature 1..37: note = Description of Artificial Sequence: Synthetic oligonucleotide
  source 1..37: mol_type = other RNA
gccacgcccaaggggtgttcactgctggcctcagcag

SEQ ID NO: 728 - RNA, 38 nt, synthetic construct
  misc_feature 1..38: note = Description of Artificial Sequence: Synthetic oligonucleotide
  source 1..38: mol_type = other RNA
tgccacgcccaaggggtgttcactgctggcctcagcag

SEQ ID NO: 729 - RNA, 38 nt, synthetic construct
  misc_feature 1..38: note = Description of Artificial Sequence: Synthetic oligonucleotide
  source 1..38: mol_type = other RNA
tgccacgcccaaggggtgttcactgctggcctctgcag

SEQ ID NO: 730 - RNA, 38 nt, synthetic construct
  misc_feature 1..38: note = Description of Artificial Sequence: Synthetic oligonucleotide
  source 1..38: mol_type = other RNA
tgccacgcccaaggggtgttcactgctggcctccgcag

SEQ ID NO: 731 - RNA, 38 nt, synthetic construct
  misc_feature 1..38: note = Description of Artificial Sequence: Synthetic oligonucleotide
  source 1..38: mol_type = other RNA
tgccacgcccaaggggtgttcactgctggcctcggcag

SEQ ID NO: 732 - RNA, 40 nt, synthetic construct
  misc_feature 1..40: note = Description of Artificial Sequence: Synthetic oligonucleotide
  source 1..40: mol_type = other RNA
actgccacgcccaaggggtgttcactgctggcctccgcag

SEQ ID NO: 733 - RNA, 40 nt, synthetic construct
  misc_feature 1..40: note = Description of Artificial Sequence: Synthetic oligonucleotide
  source 1..40: mol_type = other RNA
actgccacgcccaaggggtgttcactgctggcctcggcag

SEQ ID NO: 734 - RNA, 40 nt, synthetic construct
  misc_feature 1..40: note = Description of Artificial Sequence: Synthetic oligonucleotide
  source 1..40: mol_type = other RNA
actgccacgcccaaggggtgttcactgctggcctcagcag

SEQ ID NO: 735 - RNA, 40 nt, synthetic construct
  misc_feature 1..40: note = Description of Artificial Sequence: Synthetic oligonucleotide
  source 1..40: mol_type = other RNA
actgccacgcccaaggggtgttcactgctggcctctgcag

SEQ ID NO: 736 - RNA, 20 nt, synthetic construct
  misc_feature 1..20: note = Description of Artificial Sequence: Synthetic oligonucleotide
  source 1..20: mol_type = other RNA
aggaataaaagagcattggc

SEQ ID NO: 737 - RNA, 20 nt, synthetic construct
  misc_feature 1..20: note = Description of Artificial Sequence: Synthetic oligonucleotide
  source 1..20: mol_type = other RNA
ggaataaaagagcattggcg

SEQ ID NO: 738 - RNA, 20 nt, synthetic construct
  misc_feature 1..20: note = Description of Artificial Sequence: Synthetic oligonucleotide
  source 1..20: mol_type = other RNA
ggtgaggaataaaagagcat

SEQ ID NO: 739 - RNA, 20 nt, synthetic construct
  misc_feature 1..20: note = Description of Artificial Sequence: Synthetic oligonucleotide
  source 1..20: mol_type = other RNA
gtgaggaataaaagagcatt

SEQ ID NO: 740 - RNA, 20 nt, synthetic construct
  misc_feature 1..20: note = Description of Artificial Sequence: Synthetic oligonucleotide
  source 1..20: mol_type = other RNA
gaggaataaaagagcattgg

SEQ ID NO: 741 - RNA, 127 nt, synthetic construct
  misc_feature 1..127: note = Description of Artificial Sequence: Synthetic polynucleotide
  source 1..127: mol_type = other RNA
tctggctgtggtggggactggttttagagctagaaatagcaagttaaaataaggctagtccgttatcaacttgaaaaagtggcaccgagtcggtgcggtgttcactgctggcctcagcagtccccac

SEQ ID NO: 742 - RNA, 127 nt, synthetic construct
  misc_feature 1..127: note = Description of Artificial Sequence: Synthetic polynucleotide
  source 1..127: mol_type = other RNA
tctggctgtggtggggactggttttagagctagaaatagcaagttaaaataaggctagtccgttatcaacttgaaaaagtggcaccgagtcggtgcggtgttcactgctggcctccgcagtccccac

SEQ ID NO: 743 - RNA, 127 nt, synthetic construct
  misc_feature 1..127: note = Description of Artificial Sequence: Synthetic polynucleotide
  source 1..127: mol_type = other RNA
tctggctgtggtggggactggttttagagctagaaatagcaagttaaaataaggctagtccgttatcaacttgaaaaagtggcaccgagtcggtgcggtgttcactgctggcctctgcagtccccac

SEQ ID NO: 744 - RNA, 127 nt, synthetic construct
  misc_feature 1..127: note = Description of Artificial Sequence: Synthetic polynucleotide
  source 1..127: mol_type = other RNA
tctggctgtggtggggactggttttagagctagaaatagcaagttaaaataaggctagtccgttatcaacttgaaaaagtggcaccgagtcggtgcggtgttcactgctggcctcggcagtccccac

SEQ ID NO: 745 - RNA, 128 nt, synthetic construct
  misc_feature 1..128: note = Description of Artificial Sequence: Synthetic polynucleotide
  source 1..128: mol_type = other RNA
tctggctgtggtggggactggttttagagctagaaatagcaagttaaaataaggctagtccgttatcaacttgaaaaagtggcaccgagtcggtgcggtgttcactgctggcctctgcagtccccacc

SEQ ID NO: 746 - RNA, 128 nt, synthetic construct
  misc_feature 1..128: note = Description of Artificial Sequence: Synthetic polynucleotide
  source 1..128: mol_type = other RNA
tctggctgtggtggggactggttttagagctagaaatagcaagttaaaataaggctagtccgttatcaacttgaaaaagtggcaccgagtcggtgcggtgttcactgctggcctcagcagtccccacc

SEQ ID NO: 747 - RNA, 128 nt, synthetic construct
  misc_feature 1..128: note = Description of Artificial Sequence: Synthetic polynucleotide
  source 1..128: mol_type = other RNA
tctggctgtggtggggactggttttagagctagaaatagcaagttaaaataaggctagtccgttatcaacttgaaaaagtggcaccgagtcggtgcgggtgttcactgctggcctccgcagtccccac

SEQ ID NO: 748 - RNA, 128 nt, synthetic construct
  misc_feature 1..128: note = Description of Artificial Sequence: Synthetic polynucleotide
  source 1..128: mol_type = other RNA
tctggctgtggtggggactggttttagagctagaaatagcaagttaaaataaggctagtccgttatcaacttgaaaaagtggcaccgagtcggtgcgggtgttcactgctggcctcagcagtccccac

SEQ ID NO: 749 - RNA, 128 nt, synthetic construct
  misc_feature 1..128: note = Description of Artificial Sequence: Synthetic polynucleotide
  source 1..128: mol_type = other RNA
tctggctgtggtggggactggttttagagctagaaatagcaagttaaaataaggctagtccgttatcaacttgaaaaagtggcaccgagtcggtgcgggtgttcactgctggcctctgcagtccccac

SEQ ID NO: 750 - RNA, 128 nt, synthetic construct
  misc_feature 1..128: note = Description of Artificial Sequence: Synthetic polynucleotide
  source 1..128: mol_type = other RNA
tctggctgtggtggggactggttttagagctagaaatagcaagttaaaataaggctagtccgttatcaacttgaaaaagtggcaccgagtcggtgcgggtgttcactgctggcctcggcagtccccac

SEQ ID NO: 751 - RNA, 128 nt, synthetic construct
  misc_feature 1..128: note = Description of Artificial Sequence: Synthetic polynucleotide
  source 1..128: mol_type = other RNA
tctggctgtggtggggactggttttagagctagaaatagcaagttaaaataaggctagtccgttatcaacttgaaaaagtggcaccgagtcggtgcggtgttcactgctggcctcggcagtccccacc

SEQ ID NO: 752 - RNA, 128 nt, synthetic construct
  misc_feature 1..128: note = Description of Artificial Sequence: Synthetic polynucleotide
  source 1..128: mol_type = other RNA
tctggctgtggtggggactggttttagagctagaaatagcaagttaaaataaggctagtccgttatcaacttgaaaaagtggcaccgagtcggtgcggtgttcactgctggcctccgcagtccccacc

SEQ ID NO: 753 - RNA, 129 nt, synthetic construct
  misc_feature 1..129: note = Description of Artificial Sequence: Synthetic polynucleotide
  source 1..129: mol_type = other RNA
tctggctgtggtggggactggttttagagctagaaatagcaagttaaaataaggctagtccgttatcaacttgaaaaagtggcaccgagtcggtgcggggtgttcactgctggcctcagcagtccccac

SEQ ID NO: 754 - RNA, 129 nt, synthetic construct
  misc_feature 1..129: note = Description of Artificial Sequence: Synthetic polynucleotide
  source 1..129: mol_type = other RNA
tctggctgtggtggggactggttttagagctagaaatagcaagttaaaataaggctagtccgttatcaacttgaaaaagtggcaccgagtcggtgcggtgttcactgctggcctcggcagtccccacca

SEQ ID NO: 755 - RNA, 129 nt, synthetic construct
  misc_feature 1..129: note = Description of Artificial Sequence: Synthetic polynucleotide
  source 1..129: mol_type = other RNA
tctggctgtggtggggactggttttagagctagaaatagcaagttaaaataaggctagtccgttatcaacttgaaaaagtggcaccgagtcggtgcggtgttcactgctggcctccgcagtccccacca

SEQ ID NO: 756 - RNA, 129 nt, synthetic construct
  misc_feature 1..129: note = Description of Artificial Sequence: Synthetic polynucleotide
  source 1..129: mol_type = other RNA
tctggctgtggtggggactggttttagagctagaaatagcaagttaaaataaggctagtccgttatcaacttgaaaaagtggcaccgagtcggtgcgggtgttcactgctggcctcggcagtccccacc

SEQ ID NO: 757 - RNA, 129 nt, synthetic construct
  misc_feature 1..129: note = Description of Artificial Sequence: Synthetic polynucleotide
  source 1..129: mol_type = other RNA
tctggctgtggtggggactggttttagagctagaaatagcaagttaaaataaggctagtccgttatcaacttgaaaaagtggcaccgagtcggtgcggggtgttcactgctggcctctgcagtccccac

SEQ ID NO: 758 - RNA, 129 nt, synthetic construct
  misc_feature 1..129: note = Description of Artificial Sequence: Synthetic polynucleotide
  source 1..129: mol_type = other RNA
tctggctgtggtggggactggttttagagctagaaatagcaagttaaaataaggctagtccgttatcaacttgaaaaagtggcaccgagtcggtgcgggtgttcactgctggcctctgcagtccccacc

SEQ ID NO: 759 - RNA, 129 nt, synthetic construct
  misc_feature 1..129: note = Description of Artificial Sequence: Synthetic polynucleotide
  source 1..129: mol_type = other RNA
tctggctgtggtggggactggttttagagctagaaatagcaagttaaaataaggctagtccgttatcaacttgaaaaagtggcaccgagtcggtgcggggtgttcactgctggcctcggcagtccccac

SEQ ID NO: 760 - RNA, 129 nt, synthetic construct
  misc_feature 1..129: note = Description of Artificial Sequence: Synthetic polynucleotide
  source 1..129: mol_type = other RNA
tctggctgtggtggggactggttttagagctagaaatagcaagttaaaataaggctagtccgttatcaacttgaaaaagtggcaccgagtcggtgcgggtgttcactgctggcctccgcagtccccacc

SEQ ID NO: 761 - RNA, 129 nt, synthetic construct
  misc_feature 1..129: note = Description of Artificial Sequence: Synthetic polynucleotide
  source 1..129: mol_type = other RNA
tctggctgtggtggggactggttttagagctagaaatagcaagttaaaataaggctagtccgttatcaacttgaaaaagtggcaccgagtcggtgcgggtgttcactgctggcctcagcagtccccacc

SEQ ID NO: 762 - RNA, 129 nt, synthetic construct
  misc_feature 1..129: note = Description of Artificial Sequence: Synthetic polynucleotide
  source 1..129: mol_type = other RNA
tctggctgtggtggggactggttttagagctagaaatagcaagttaaaataaggctagtccgttatcaacttgaaaaagtggcaccgagtcggtgcggggtgttcactgctggcctccgcagtccccac

SEQ ID NO: 763 - RNA, 129 nt, synthetic construct
  misc_feature 1..129: note = Description of Artificial Sequence: Synthetic polynucleotide
  source 1..129: mol_type = other RNA
tctggctgtggtggggactggttttagagctagaaatagcaagttaaaataaggctagtccgttatcaacttgaaaaagtggcaccgagtcggtgcggtgttcactgctggcctctgcagtccccacca

SEQ ID NO: 764 - RNA, 129 nt, synthetic construct
  misc_feature 1..129: note = Description of Artificial Sequence: Synthetic polynucleotide
  source 1..129: mol_type = other RNA
tctggctgtggtggggactggttttagagctagaaatagcaagttaaaataaggctagtccgttatcaacttgaaaaagtggcaccgagtcggtgcggtgttcactgctggcctcagcagtccccacca

SEQ ID NO: 765 - RNA, 130 nt, synthetic construct
  misc_feature 1..130: note = Description of Artificial Sequence: Synthetic polynucleotide
  source 1..130: mol_type = other RNA
tctggctgtggtggggactggttttagagctagaaatagcaagttaaaataaggctagtccgttatcaacttgaaaaagtggcaccgagtcggtgcggggtgttcactgctggcctccgcagtccccacc

SEQ ID NO: 766 - RNA, 130 nt, synthetic construct
  misc_feature 1..130: note = Description of Artificial Sequence: Synthetic polynucleotide
  source 1..130: mol_type = other RNA
tctggctgtggtggggactggttttagagctagaaatagcaagttaaaataaggctagtccgttatcaacttgaaaaagtggcaccgagtcggtgcgggtgttcactgctggcctctgcagtccccacca

SEQ ID NO: 767 - RNA, 130 nt, synthetic construct
  misc_feature 1..130: note = Description of Artificial Sequence: Synthetic polynucleotide
  source 1..130: mol_type = other RNA
tctggctgtggtggggactggttttagagctagaaatagcaagttaaaataaggctagtccgttatcaacttgaaaaagtggcaccgagtcggtgcggggtgttcactgctggcctctgcagtccccacc

SEQ ID NO: 768 - RNA, 130 nt, synthetic construct
  misc_feature 1..130: note = Description of Artificial Sequence: Synthetic polynucleotide
  source 1..130: mol_type = other RNA
tctggctgtggtggggactggttttagagctagaaatagcaagttaaaataaggctagtccgttatcaacttgaaaaagtggcaccgagtcggtgcgggtgttcactgctggcctccgcagtccccacca

SEQ ID NO: 769 - RNA, 130 nt, synthetic construct
  misc_feature 1..130: note = Description of Artificial Sequence: Synthetic polynucleotide
  source 1..130: mol_type = other RNA
tctggctgtggtggggactggttttagagctagaaatagcaagttaaaataaggctagtccgttatcaacttgaaaaagtggcaccgagtcggtgcaggggtgttcactgctggcctcagcagtccccac

SEQ ID NO: 770 - RNA, 130 nt, synthetic construct
  misc_feature 1..130: note = Description of Artificial Sequence: Synthetic polynucleotide
  source 1..130: mol_type = other RNA
tctggctgtggtggggactggttttagagctagaaatagcaagttaaaataaggctagtccgttatcaacttgaaaaagtggcaccgagtcggtgcggggtgttcactgctggcctcggcagtccccacc

SEQ ID NO: 771 - RNA, 130 nt, synthetic construct
  misc_feature 1..130: note = Description of Artificial Sequence: Synthetic polynucleotide
  source 1..130: mol_type = other RNA
tctggctgtggtggggactggttttagagctagaaatagcaagttaaaataaggctagtccgttatcaacttgaaaaagtggcaccgagtcggtgcaggggtgttcactgctggcctcggcagtccccac

SEQ ID NO: 772 - RNA, 130 nt, synthetic construct
  misc_feature 1..130: note = Description of Artificial Sequence: Synthetic polynucleotide
  source 1..130: mol_type = other RNA
tctggctgtggtggggactggttttagagctagaaatagcaagttaaaataaggctagtccgttatcaacttgaaaaagtggcaccgagtcggtgcggtgttcactgctggcctcagcagtccccaccac

SEQ ID NO: 773 - RNA, 130 nt, synthetic construct
  misc_feature 1..130: note = Description of Artificial Sequence: Synthetic polynucleotide
  source 1..130: mol_type = other RNA
tctggctgtggtggggactggttttagagctagaaatagcaagttaaaataaggctagtccgttatcaacttgaaaaagtggcaccgagtcggtgcgggtgttcactgctggcctcagcagtccccacca

SEQ ID NO: 774 - RNA, 130 nt, synthetic construct
  misc_feature 1..130: note = Description of Artificial Sequence: Synthetic polynucleotide
  source 1..130: mol_type = other RNA
tctggctgtggtggggactggttttagagctagaaatagcaagttaaaataaggctagtccgttatcaacttgaaaaagtggcaccgagtcggtgcaggggtgttcactgctggcctctgcagtccccac

SEQ ID NO: 775 - RNA, 130 nt, synthetic construct
  misc_feature 1..130: note = Description of Artificial Sequence: Synthetic polynucleotide
  source 1..130: mol_type = other RNA
tctggctgtggtggggactggttttagagctagaaatagcaagttaaaataaggctagtccgttatcaacttgaaaaagtggcaccgagtcggtgcggtgttcactgctggcctcggcagtccccaccac

SEQ ID NO: 776 - RNA, 130 nt, synthetic construct
  misc_feature 1..130: note = Description of Artificial Sequence: Synthetic polynucleotide
  source 1..130: mol_type = other RNA
tctggctgtggtggggactggttttagagctagaaatagcaagttaaaataaggctagtccgttatcaacttgaaaaagtggcaccgagtcggtgcgggtgttcactgctggcctcggcagtccccacca

SEQ ID NO: 777 - RNA, 130 nt, synthetic construct
  misc_feature 1..130: note = Description of Artificial Sequence: Synthetic polynucleotide
  source 1..130: mol_type = other RNA
tctggctgtggtggggactggttttagagctagaaatagcaagttaaaataaggctagtccgttatcaacttgaaaaagtggcaccgagtcggtgcggtgttcactgctggcctccgcagtccccaccac

SEQ ID NO: 778 - RNA, 130 nt, synthetic construct
  misc_feature 1..130: note = Description of Artificial Sequence: Synthetic polynucleotide
  source 1..130: mol_type = other RNA
tctggctgtggtggggactggttttagagctagaaatagcaagttaaaataaggctagtccgttatcaacttgaaaaagtggcaccgagtcggtgcggtgttcactgctggcctctgcagtccccaccac

SEQ ID NO: 779 - RNA, 130 nt, synthetic construct
  misc_feature 1..130: note = Description of Artificial Sequence: Synthetic polynucleotide
  source 1..130: mol_type = other RNA
tctggctgtggtggggactggttttagagctagaaatagcaagttaaaataaggctagtccgttatcaacttgaaaaagtggcaccgagtcggtgcaggggtgttcactgctggcctccgcagtccccac

SEQ ID NO: 780 - RNA, 130 nt, synthetic construct
  misc_feature 1..130: note = Description of Artificial Sequence: Synthetic polynucleotide
  source 1..130: mol_type = other RNA
tctggctgtggtggggactggttttagagctagaaatagcaagttaaaataaggctagtccgttatcaacttgaaaaagtggcaccgagtcggtgcggggtgttcactgctggcctcagcagtccccacc

SEQ ID NO: 781 - RNA, 131 nt, synthetic construct
  misc_feature 1..131: note = Description of Artificial Sequence: Synthetic polynucleotide
  source 1..131: mol_type = other RNA
tctggctgtggtggggactggttttagagctagaaatagcaagttaaaataaggctagtccgttatcaacttgaaaaagtggcaccgagtcggtgcgggtgttcactgctggcctccgcagtccccaccac

SEQ ID NO: 782 - RNA, 131 nt, synthetic construct
  misc_feature 1..131: note = Description of Artificial Sequence: Synthetic polynucleotide
  source 1..131: mol_type = other RNA
tctggctgtggtggggactggttttagagctagaaatagcaagttaaaataaggctagtccgttatcaacttgaaaaagtggcaccgagtcggtgcggggtgttcactgctggcctccgcagtccccacca

SEQ ID NO: 783 - RNA, 131 nt, synthetic construct
  misc_feature 1..131: note = Description of Artificial Sequence: Synthetic polynucleotide
  source 1..131: mol_type = other RNA
tctggctgtggtggggactggttttagagctagaaatagcaagttaaaataaggctagtccgttatcaacttgaaaaagtggcaccgagtcggtgcaggggtgttcactgctggcctccgcagtccccacc

SEQ ID NO: 784 - RNA, 131 nt, synthetic construct
  misc_feature 1..131: note = Description of Artificial Sequence: Synthetic polynucleotide
  source 1..131: mol_type = other RNA
tctggctgtggtggggactggttttagagctagaaatagcaagttaaaataaggctagtccgttatcaacttgaaaaagtggcaccgagtcggtgcgggtgttcactgctggcctcggcagtccccaccac

SEQ ID NO: 785 - RNA, 131 nt, synthetic construct
  misc_feature 1..131: note = Description of Artificial Sequence: Synthetic polynucleotide
  source 1..131: mol_type = other RNA
tctggctgtggtggggactggttttagagctagaaatagcaagttaaaataaggctagtccgttatcaacttgaaaaagtggcaccgagtcggtgcggggtgttcactgctggcctctgcagtccccacca

SEQ ID NO: 786 - RNA, 131 nt, synthetic construct
  misc_feature 1..131: note = Description of Artificial Sequence: Synthetic polynucleotide
  source 1..131: mol_type = other RNA
tctggctgtggtggggactggttttagagctagaaatagcaagttaaaataaggctagtccgttatcaacttgaaaaagtggcaccgagtcggtgcggtgttcactgctggcctctgcagtccccaccaca

SEQ ID NO: 787 - RNA, 131 nt, synthetic construct
  misc_feature 1..131: note = Description of Artificial Sequence: Synthetic polynucleotide
  source 1..131: mol_type = other RNA
tctggctgtggtggggactggttttagagctagaaatagcaagttaaaataaggctagtccgttatcaacttgaaaaagtggcaccgagtcggtgcgggtgttcactgctggcctctgcagtccccaccac

SEQ ID NO: 788 - RNA, 131 nt, synthetic construct
  misc_feature 1..131: note = Description of Artificial Sequence: Synthetic polynucleotide
  source 1..131: mol_type = other RNA
tctggctgtggtggggactggttttagagctagaaatagcaagttaaaataaggctagtccgttatcaacttgaaaaagtggcaccgagtcggtgcaaggggtgttcactgctggcctcggcagtccccac

SEQ ID NO: 789 - RNA, 131 nt, synthetic construct
  misc_feature 1..131: note = Description of Artificial Sequence: Synthetic polynucleotide
  source 1..131: mol_type = other RNA
tctggctgtggtggggactggttttagagctagaaatagcaagttaaaataaggctagtccgttatcaacttgaaaaagtggcaccgagtcggtgcaggggtgttcactgctggcctcagcagtccccacc

SEQ ID NO: 790 - RNA, 131 nt, synthetic construct
  misc_feature 1..131: note = Description of Artificial Sequence: Synthetic polynucleotide
  source 1..131: mol_type = other RNA
tctggctgtggtggggactggttttagagctagaaatagcaagttaaaataaggctagtccgttatcaacttgaaaaagtggcaccgagtcggtgcaggggtgttcactgctggcctcggcagtccccacc

SEQ ID NO: 791 - RNA, 131 nt, synthetic construct
  misc_feature 1..131: note = Description of Artificial Sequence: Synthetic polynucleotide
  source 1..131: mol_type = other RNA
tctggctgtggtggggactggttttagagctagaaatagcaagttaaaataaggctagtccgttatcaacttgaaaaagtggcaccgagtcggtgcgggtgttcactgctggcctcagcagtccccaccac

SEQ ID NO: 792 - RNA, 131 nt, synthetic construct
  misc_feature 1..131: note = Description of Artificial Sequence: Synthetic polynucleotide
  source 1..131: mol_type = other RNA
tctggctgtggtggggactggttttagagctagaaatagcaagttaaaataaggctagtccgttatcaacttgaaaaagtggcaccgagtcggtgcggtgttcactgctggcctccgcagtccccaccaca

SEQ ID NO: 793 - RNA, 131 nt, synthetic construct
  misc_feature 1..131: note = Description of Artificial Sequence: Synthetic polynucleotide
  source 1..131: mol_type = other RNA
tctggctgtggtggggactggttttagagctagaaatagcaagttaaaataaggctagtccgttatcaacttgaaaaagtggcaccgagtcggtgcggggtgttcactgctggcctcagcagtccccacca

SEQ ID NO: 794 - RNA, 131 nt, synthetic construct
  misc_feature 1..131: note = Description of Artificial Sequence: Synthetic polynucleotide
  source 1..131: mol_type = other RNA
tctggctgtggtggggactggttttagagctagaaatagcaagttaaaataaggctagtccgttatcaacttgaaaaagtggcaccgagtcggtgcaaggggtgttcactgctggcctccgcagtccccac

SEQ ID NO: 795 - RNA, 131 nt, synthetic construct
  misc_feature 1..131: note = Description of Artificial Sequence: Synthetic polynucleotide
  source 1..131: mol_type = other RNA
tctggctgtggtggggactggttttagagctagaaatagcaagttaaaataaggctagtccgttatcaacttgaaaaagtggcaccgagtcggtgcaaggggtgttcactgctggcctctgcagtccccac

SEQ ID NO: 796 - RNA, 131 nt, synthetic construct
  misc_feature 1..131: note = Description of Artificial Sequence: Synthetic polynucleotide
  source 1..131: mol_type = other RNA
tctggctgtggtggggactggttttagagctagaaatagcaagttaaaataaggctagtccgttatcaacttgaaaaagtggcaccgagtcggtgcaggggtgttcactgctggcctctgcagtccccacc

SEQ ID NO: 797 - RNA, 131 nt, synthetic construct
  misc_feature 1..131: note = Description of Artificial Sequence: Synthetic polynucleotide
  source 1..131: mol_type = other RNA
tctggctgtggtggggactggttttagagctagaaatagcaagttaaaataaggctagtccgttatcaacttgaaaaagtggcaccgagtcggtgcggggtgttcactgctggcctcggcagtccccacca

SEQ ID NO: 798 - RNA, 131 nt, synthetic construct
  misc_feature 1..131: note = Description of Artificial Sequence: Synthetic polynucleotide
  source 1..131: mol_type = other RNA
tctggctgtggtggggactggttttagagctagaaatagcaagttaaaataaggctagtccgttatcaacttgaaaaagtggcaccgagtcggtgcggtgttcactgctggcctcggcagtccccaccaca

SEQ ID NO: 799 - RNA, 131 nt, synthetic construct
  misc_feature 1..131: note = Description of Artificial Sequence: Synthetic polynucleotide
  source 1..131: mol_type = other RNA
tctggctgtggtggggactggttttagagctagaaatagcaagttaaaataaggctagtccgttatcaacttgaaaaagtggcaccgagtcggtgcaaggggtgttcactgctggcctcagcagtccccac

SEQ ID NO: 800 - RNA, 131 nt, synthetic construct
  misc_feature 1..131: note = Description of Artificial Sequence: Synthetic polynucleotide
  source 1..131: mol_type = other RNA
tctggctgtggtggggactggttttagagctagaaatagcaagttaaaataaggctagtccgttatcaacttgaaaaagtggcaccgagtcggtgcggtgttcactgctggcctcagcagtccccaccaca

SEQ ID NO: 801 - RNA, 132 nt, synthetic construct
  misc_feature 1..132: note = Description of Artificial Sequence: Synthetic polynucleotide
  source 1..132: mol_type = other RNA
tctggctgtggtggggactggttttagagctagaaatagcaagttaaaataaggctagtccgttatcaacttgaaaaagtggcaccgagtcggtgcggggtgttcactgctggcctcggcagtccccaccac

SEQ ID NO: 802 - RNA, 132 nt, synthetic construct
  misc_feature 1..132: note = Description of Artificial Sequence: Synthetic polynucleotide
  source 1..132: mol_type = other RNA
tctggctgtggtggggactggttttagagctagaaatagcaagttaaaataaggctagtccgttatcaacttgaaaaagtggcaccgagtcggtgcaggggtgttcactgctggcctctgcagtccccacca

SEQ ID NO: 803 - RNA, 132 nt, synthetic construct
  misc_feature 1..132: note = Description of Artificial Sequence: Synthetic polynucleotide
  source 1..132: mol_type = other RNA
tctggctgtggtggggactggttttagagctagaaatagcaagttaaaataaggctagtccgttatcaacttgaaaaagtggcaccgagtcggtgcaggggtgttcactgctggcctccgcagtccccacca

SEQ ID NO: 804 - RNA, 132 nt, synthetic construct
  misc_feature 1..132: note = Description of Artificial Sequence: Synthetic polynucleotide
  source 1..132: mol_type = other RNA
tctggctgtggtggggactggttttagagctagaaatagcaagttaaaataaggctagtccgttatcaacttgaaaaagtggcaccgagtcggtgcaaggggtgttcactgctggcctccgcagtccccacc

SEQ ID NO: 805 - RNA, 132 nt, synthetic construct
  misc_feature 1..132: note = Description of Artificial Sequence: Synthetic polynucleotide
  source 1..132: mol_type = other RNA
tctggctgtggtggggactggttttagagctagaaatagcaagttaaaataaggctagtccgttatcaacttgaaaaagtggcaccgagtcggtgcggtgttcactgctggcctcagcagtccccaccacag

SEQ ID NO: 806 - RNA, 132 nt, synthetic construct
  misc_feature 1..132: note = Description of Artificial Sequence: Synthetic polynucleotide
  source 1..132: mol_type = other RNA
tctggctgtggtggggactggttttagagctagaaatagcaagttaaaataaggctagtccgttatcaacttgaaaaagtggcaccgagtcggtgcgggtgttcactgctggcctccgcagtccccaccaca

SEQ ID NO: 807 - RNA, 132 nt, synthetic construct
  misc_feature 1..132: note = Description of Artificial Sequence: Synthetic polynucleotide
  source 1..132: mol_type = other RNA
tctggctgtggtggggactggttttagagctagaaatagcaagttaaaataaggctagtccgttatcaacttgaaaaagtggcaccgagtcggtgcggggtgttcactgctggcctccgcagtccccaccac

SEQ ID NO: 808 - RNA, 132 nt, synthetic construct
  misc_feature 1..132: note = Description of Artificial Sequence: Synthetic polynucleotide
  source 1..132: mol_type = other RNA
tctggctgtggtggggactggttttagagctagaaatagcaagttaaaataaggctagtccgttatcaacttgaaaaagtggcaccgagtcggtgcgggtgttcactgctggcctcggcagtccccaccaca

SEQ ID NO: 809 - RNA, 132 nt, synthetic construct
  misc_feature 1..132: note = Description of Artificial Sequence: Synthetic polynucleotide
  source 1..132: mol_type = other RNA
tctggctgtggtggggactggttttagagctagaaatagcaagttaaaataaggctagtccgttatcaacttgaaaaagtggcaccgagtcggtgcaaggggtgttcactgctggcctcggcagtccccacc

SEQ ID NO: 810 - RNA, 132 nt, synthetic construct
  misc_feature 1..132: note = Description of Artificial Sequence: Synthetic polynucleotide
  source 1..132: mol_type = other RNA
tctggctgtggtggggactggttttagagctagaaatagcaagttaaaataaggctagtccgttatcaacttgaaaaagtggcaccgagtcggtgcgggtgttcactgctggcctcagcagtccccaccaca

SEQ ID NO: 811 - RNA, 132 nt, synthetic construct
  misc_feature 1..132: note = Description of Artificial Sequence: Synthetic polynucleotide
  source 1..132: mol_type = other RNA
tctggctgtggtggggactggttttagagctagaaatagcaagttaaaataaggctagtccgttatcaacttgaaaaagtggcaccgagtcggtgcggtgttcactgctggcctctgcagtccccaccacag

SEQ ID NO: 812 - RNA, 132 nt, synthetic construct
  misc_feature 1..132: note = Description of Artificial Sequence: Synthetic polynucleotide
  source 1..132: mol_type = other RNA
tctggctgtggtggggactggttttagagctagaaatagcaagttaaaataaggctagtccgttatcaacttgaaaaagtggcaccgagtcggtgcaaggggtgttcactgctggcctctgcagtccccacc

SEQ ID NO: 813 - RNA, 132 nt, synthetic construct
  misc_feature 1..132: note = Description of Artificial Sequence: Synthetic polynucleotide
  source 1..132: mol_type = other RNA
tctggctgtggtggggactggttttagagctagaaatagcaagttaaaataaggctagtccgttatcaacttgaaaaagtggcaccgagtcggtgcggggtgttcactgctggcctcagcagtccccaccac

SEQ ID NO: 814 - RNA, 132 nt, synthetic construct
  misc_feature 1..132: note = Description of Artificial Sequence: Synthetic polynucleotide
  source 1..132: mol_type = other RNA
tctggctgtggtggggactggttttagagctagaaatagcaagttaaaataaggctagtccgttatcaacttgaaaaagtggcaccgagtcggtgcgggtgttcactgctggcctctgcagtccccaccaca

SEQ ID NO: 815 - RNA, 132 nt, synthetic construct
  misc_feature 1..132: note = Description of Artificial Sequence: Synthetic polynucleotide
  source 1..132: mol_type = other RNA
tctggctgtggtggggactggttttagagctagaaatagcaagttaaaataaggctagtccgttatcaacttgaaaaagtggcaccgagtcggtgcggtgttcactgctggcctcggcagtccccaccacag

SEQ ID NO: 816 - RNA, 132 nt, synthetic construct
  misc_feature 1..132: note = Description of Artificial Sequence: Synthetic polynucleotide
  source 1..132: mol_type = other RNA
tctggctgtggtggggactggttttagagctagaaatagcaagttaaaataaggctagtccgttatcaacttgaaaaagtggcaccgagtcggtgcaaggggtgttcactgctggcctcagcagtccccacc

SEQ ID NO: 817 - RNA, 132 nt, synthetic construct
  misc_feature 1..132: note = Description of Artificial Sequence: Synthetic polynucleotide
  source 1..132: mol_type = other RNA
tctggctgtggtggggactggttttagagctagaaatagcaagttaaaataaggctagtccgttatcaacttgaaaaagtggcaccgagtcggtgcaggggtgttcactgctggcctcggcagtccccacca

SEQ ID NO: 818 - RNA, 132 nt, synthetic construct
  misc_feature 1..132: note = Description of Artificial Sequence: Synthetic polynucleotide
  source 1..132: mol_type = other RNA
tctggctgtggtggggactggttttagagctagaaatagcaagttaaaataaggctagtccgttatcaacttgaaaaagtggcaccgagtcggtgcaggggtgttcactgctggcctcagcagtccccacca

SEQ ID NO: 819 - RNA, 132 nt, synthetic construct
  misc_feature 1..132: note = Description of Artificial Sequence: Synthetic polynucleotide
  source 1..132: mol_type = other RNA
tctggctgtggtggggactggttttagagctagaaatagcaagttaaaataaggctagtccgttatcaacttgaaaaagtggcaccgagtcggtgcggtgttcactgctggcctccgcagtccccaccacag

SEQ ID NO: 820 - RNA, 132 nt, synthetic construct
  misc_feature 1..132: note = Description of Artificial Sequence: Synthetic polynucleotide
  source 1..132: mol_type = other RNA
tctggctgtggtggggactggttttagagctagaaatagcaagttaaaataaggctagtccgttatcaacttgaaaaagtggcaccgagtcggtgcggggtgttcactgctggcctctgcagtccccaccac

SEQ ID NO: 821 - RNA, 133 nt, synthetic construct
  misc_feature 1..133: note = Description of Artificial Sequence: Synthetic polynucleotide
  source 1..133: mol_type = other RNA
tctggctgtggtggggactggttttagagctagaaatagcaagttaaaataaggctagtccgttatcaacttgaaaaagtggcaccgagtcggtgcggtgttcactgctggcctctgcagtccccaccacagc

SEQ ID NO: 822 - RNA, 133 nt, synthetic construct
  misc_feature 1..133: note = Description of Artificial Sequence: Synthetic polynucleotide
  source 1..133: mol_type = other RNA
tctggctgtggtggggactggttttagagctagaaatagcaagttaaaataaggctagtccgttatcaacttgaaaaagtggcaccgagtcggtgcgggtgttcactgctggcctctgcagtccccaccacag

SEQ ID NO: 823 - RNA, 133 nt, synthetic construct
  misc_feature 1..133: note = Description of Artificial Sequence: Synthetic polynucleotide
  source 1..133: mol_type = other RNA
tctggctgtggtggggactggttttagagctagaaatagcaagttaaaataaggctagtccgttatcaacttgaaaaagtggcaccgagtcggtgcaaggggtgttcactgctggcctctgcagtccccacca

SEQ ID NO: 824 - RNA, 133 nt, synthetic construct
  misc_feature 1..133: note = Description of Artificial Sequence: Synthetic polynucleotide
  source 1..133: mol_type = other RNA
tctggctgtggtggggactggttttagagctagaaatagcaagttaaaataaggctagtccgttatcaacttgaaaaagtggcaccgagtcggtgcaggggtgttcactgctggcctcagcagtccccaccac

SEQ ID NO: 825 - RNA, 133 nt, synthetic construct
  misc_feature 1..133: note = Description of Artificial Sequence: Synthetic polynucleotide
  source 1..133: mol_type = other RNA
tctggctgtggtggggactggttttagagctagaaatagcaagttaaaataaggctagtccgttatcaacttgaaaaagtggcaccgagtcggtgcgggtgttcactgctggcctccgcagtccccaccacag

SEQ ID NO: 826 - RNA, 133 nt, synthetic construct
  misc_feature 1..133: note = Description of Artificial Sequence: Synthetic polynucleotide
  source 1..133: mol_type = other RNA
tctggctgtggtggggactggttttagagctagaaatagcaagttaaaataaggctagtccgttatcaacttgaaaaagtggcaccgagtcggtgcggtgttcactgctggcctcggcagtccccaccacagc

SEQ ID NO: 827 - RNA, 133 nt, synthetic construct
  misc_feature 1..133: note = Description of Artificial Sequence: Synthetic polynucleotide
  source 1..133: mol_type = other RNA
tctggctgtggtggggactggttttagagctagaaatagcaagttaaaataaggctagtccgttatcaacttgaaaaagtggcaccgagtcggtgcggtgttcactgctggcctcagcagtccccaccacagc

SEQ ID NO: 828 - RNA, 133 nt, synthetic construct
  misc_feature 1..133: note = Description of Artificial Sequence: Synthetic polynucleotide
  source 1..133: mol_type = other RNA
tctggctgtggtggggactggttttagagctagaaatagcaagttaaaataaggctagtccgttatcaacttgaaaaagtggcaccgagtcggtgcaggggtgttcactgctggcctctgcagtccccaccac

SEQ ID NO: 829 - RNA, 133 nt, synthetic construct
  misc_feature 1..133: note = Description of Artificial Sequence: Synthetic polynucleotide
  source 1..133: mol_type = other RNA
tctggctgtggtggggactggttttagagctagaaatagcaagttaaaataaggctagtccgttatcaacttgaaaaagtggcaccgagtcggtgcaggggtgttcactgctggcctcggcagtccccaccac

SEQ ID NO: 830 - RNA, 133 nt, synthetic construct
  misc_feature 1..133: note = Description of Artificial Sequence: Synthetic polynucleotide
  source 1..133: mol_type = other RNA
tctggctgtggtggggactggttttagagctagaaatagcaagttaaaataaggctagtccgttatcaacttgaaaaagtggcaccgagtcggtgcggggtgttcactgctggcctcagcagtccccaccaca

SEQ ID NO: 831 - RNA, 133 nt, synthetic construct
  misc_feature 1..133: note = Description of Artificial Sequence: Synthetic polynucleotide
  source 1..133: mol_type = other RNA
tctggctgtggtggggactggttttagagctagaaatagcaagttaaaataaggctagtccgttatcaacttgaaaaagtggcaccgagtcggtgcaaggggtgttcactgctggcctcagcagtccccacca

SEQ ID NO: 832 - RNA, 133 nt, synthetic construct
  misc_feature 1..133: note = Description of Artificial Sequence: Synthetic polynucleotide
  source 1..133: mol_type = other RNA
tctggctgtggtggggactggttttagagctagaaatagcaagttaaaataaggctagtccgttatcaacttgaaaaagtggcaccgagtcggtgcgggtgttcactgctggcctcggcagtccccaccacag

SEQ ID NO: 833 - RNA, 133 nt, synthetic construct
  misc_feature 1..133: note = Description of Artificial Sequence: Synthetic polynucleotide
  source 1..133: mol_type = other RNA
tctggctgtggtggggactggttttagagctagaaatagcaagttaaaataaggctagtccgttatcaacttgaaaaagtggcaccgagtcggtgcggggtgttcactgctggcctcggcagtccccaccaca

SEQ ID NO: 834 - RNA, 133 nt, synthetic construct
  misc_feature 1..133: note = Description of Artificial Sequence: Synthetic polynucleotide
  source 1..133: mol_type = other RNA
tctggctgtggtggggactggttttagagctagaaatagcaagttaaaataaggctagtccgttatcaacttgaaaaagtggcaccgagtcggtgcggggtgttcactgctggcctccgcagtccccaccaca

SEQ ID NO: 835 - RNA, 133 nt, synthetic construct
  misc_feature 1..133: note = Description of Artificial Sequence: Synthetic polynucleotide
  source 1..133: mol_type = other RNA
tctggctgtggtggggactggttttagagctagaaatagcaagttaaaataaggctagtccgttatcaacttgaaaaagtggcaccgagtcggtgcgggtgttcactgctggcctcagcagtccccaccacag

SEQ ID NO: 836 - RNA, 133 nt, synthetic construct
  misc_feature 1..133: note = Description of Artificial Sequence: Synthetic polynucleotide
  source 1..133: mol_type = other RNA
tctggctgtggtggggactggttttagagctagaaatagcaagttaaaataaggctagtccgttatcaacttgaaaaagtggcaccgagtcggtgcggggtgttcactgctggcctctgcagtccccaccaca

SEQ ID NO: 837 - RNA, 133 nt, synthetic construct
  misc_feature 1..133: note = Description of Artificial Sequence: Synthetic polynucleotide
  source 1..133: mol_type = other RNA
tctggctgtggtggggactggttttagagctagaaatagcaagttaaaataaggctagtccgttatcaacttgaaaaagtggcaccgagtcggtgcaaggggtgttcactgctggcctcggcagtccccacca

SEQ ID NO: 838 - RNA, 133 nt, synthetic construct
  misc_feature 1..133: note = Description of Artificial Sequence: Synthetic polynucleotide
  source 1..133: mol_type = other RNA
tctggctgtggtggggactggttttagagctagaaatagcaagttaaaataaggctagtccgttatcaacttgaaaaagtggcaccgagtcggtgcaggggtgttcactgctggcctccgcagtccccaccac

SEQ ID NO: 839 - RNA, 133 nt, synthetic construct
  misc_feature 1..133: note = Description of Artificial Sequence: Synthetic polynucleotide
  source 1..133: mol_type = other RNA
tctggctgtggtggggactggttttagagctagaaatagcaagttaaaataaggctagtccgttatcaacttgaaaaagtggcaccgagtcggtgcaaggggtgttcactgctggcctccgcagtccccacca

SEQ ID NO: 840 - RNA, 133 nt, synthetic construct
  misc_feature 1..133: note = Description of Artificial Sequence: Synthetic polynucleotide
  source 1..133: mol_type = other RNA
tctggctgtggtggggactggttttagagctagaaatagcaagttaaaataaggctagtccgttatcaacttgaaaaagtggcaccgagtcggtgcggtgttcactgctggcctccgcagtccccaccacagc

SEQ ID NO: 841 - RNA, 134 nt, synthetic construct
  misc_feature 1..134: note = Description of Artificial Sequence: Synthetic polynucleotide
  source 1..134: mol_type = other RNA
tctggctgtggtggggactggttttagagctagaaatagcaagttaaaataaggctagtccgttatcaacttgaaaaagtggcaccgagtcggtgcggtgttcactgctggcctcggcagtccccaccacagcc

SEQ ID NO: 842 - RNA, 134 nt, synthetic construct
  misc_feature 1..134: note = Description of Artificial Sequence: Synthetic polynucleotide
  source 1..134: mol_type = other RNA
tctggctgtggtggggactggttttagagctagaaatagcaagttaaaataaggctagtccgttatcaacttgaaaaagtggcaccgagtcggtgcaggggtgttcactgctggcctcggcagtccccaccaca

SEQ ID NO: 843 - RNA, 134 nt, synthetic construct
  misc_feature 1..134: note = Description of Artificial Sequence: Synthetic polynucleotide
  source 1..134: mol_type = other RNA
tctggctgtggtggggactggttttagagctagaaatagcaagttaaaataaggctagtccgttatcaacttgaaaaagtggcaccgagtcggtgcggggtgttcactgctggcctccgcagtccccaccacag

SEQ ID NO: 844 - RNA, 134 nt, synthetic construct
  misc_feature 1..134: note = Description of Artificial Sequence: Synthetic polynucleotide
  source 1..134: mol_type = other RNA
tctggctgtggtggggactggttttagagctagaaatagcaagttaaaataaggctagtccgttatcaacttgaaaaagtggcaccgagtcggtgcaggggtgttcactgctggcctcagcagtccccaccaca

SEQ ID NO: 845 - RNA, 134 nt, synthetic construct
  misc_feature 1..134: note = Description of Artificial Sequence: Synthetic polynucleotide
  source 1..134: mol_type = other RNA
tctggctgtggtggggactggttttagagctagaaatagcaagttaaaataaggctagtccgttatcaacttgaaaaagtggcaccgagtcggtgcaggggtgttcactgctggcctccgcagtccccaccaca

SEQ ID NO: 846 - RNA, 134 nt, synthetic construct
  misc_feature 1..134: note = Description of Artificial Sequence: Synthetic polynucleotide
  source 1..134: mol_type = other RNA
tctggctgtggtggggactggttttagagctagaaatagcaagttaaaataaggctagtccgttatcaacttgaaaaagtggcaccgagtcggtgcggtgttcactgctggcctcagcagtccccaccacagcc

SEQ ID NO: 847 - RNA, 134 nt, synthetic construct
  misc_feature 1..134: note = Description of Artificial Sequence: Synthetic polynucleotide
  source 1..134: mol_type = other RNA
tctggctgtggtggggactggttttagagctagaaatagcaagttaaaataaggctagtccgttatcaacttgaaaaagtggcaccgagtcggtgcgggtgttcactgctggcctctgcagtccccaccacagc

SEQ ID NO: 848 - RNA, 134 nt, synthetic construct
  misc_feature 1..134: note = Description of Artificial Sequence: Synthetic polynucleotide
  source 1..134: mol_type = other RNA
tctggctgtggtggggactggttttagagctagaaatagcaagttaaaataaggctagtccgttatcaacttgaaaaagtggcaccgagtcggtgcgggtgttcactgctggcctcagcagtccccaccacagc

SEQ ID NO: 849 - RNA, 134 nt, synthetic construct
  misc_feature 1..134: note = Description of Artificial Sequence: Synthetic polynucleotide
  source 1..134: mol_type = other RNA
tctggctgtggtggggactggttttagagctagaaatagcaagttaaaataaggctagtccgttatcaacttgaaaaagtggcaccgagtcggtgcggggtgttcactgctggcctctgcagtccccaccacag

SEQ ID NO: 850 - RNA, 134 nt, synthetic construct
  misc_feature 1..134: note = Description of Artificial Sequence: Synthetic polynucleotide
  source 1..134: mol_type = other RNA
tctggctgtggtggggactggttttagagctagaaatagcaagttaaaataaggctagtccgttatcaacttgaaaaagtggcaccgagtcggtgcgggtgttcactgctggcctcggcagtccccaccacagc

SEQ ID NO: 851 - RNA, 134 nt, synthetic construct
  misc_feature 1..134: note = Description of Artificial Sequence: Synthetic polynucleotide
  source 1..134: mol_type = other RNA
tctggctgtggtggggactggttttagagctagaaatagcaagttaaaataaggctagtccgttatcaacttgaaaaagtggcaccgagtcggtgcggtgttcactgctggcctccgcagtccccaccacagcc

SEQ ID NO: 852 - RNA, 134 nt, synthetic construct
  misc_feature 1..134: note = Description of Artificial Sequence: Synthetic polynucleotide
  source 1..134: mol_type = other RNA
tctggctgtggtggggactggttttagagctagaaatagcaagttaaaataaggctagtccgttatcaacttgaaaaagtggcaccgagtcggtgcaaggggtgttcactgctggcctccgcagtccccaccac

SEQ ID NO: 853 - RNA, 134 nt, synthetic construct
  misc_feature 1..134: note = Description of Artificial Sequence: Synthetic polynucleotide
  source 1..134: mol_type = other RNA
tctggctgtggtggggactggttttagagctagaaatagcaagttaaaataaggctagtccgttatcaacttgaaaaagtggcaccgagtcggtgcggggtgttcactgctggcctcggcagtccccaccacag

SEQ ID NO: 854 - RNA, 134 nt, synthetic construct
  misc_feature 1..134: note = Description of Artificial Sequence: Synthetic polynucleotide
  source 1..134: mol_type = other RNA
tctggctgtggtggggactggttttagagctagaaatagcaagttaaaataaggctagtccgttatcaacttgaaaaagtggcaccgagtcggtgcaaggggtgttcactgctggcctctgcagtccccaccac

SEQ ID NO: 855 - RNA, 134 nt, synthetic construct
  misc_feature 1..134: note = Description of Artificial Sequence: Synthetic polynucleotide
  source 1..134: mol_type = other RNA
tctggctgtggtggggactggttttagagctagaaatagcaagttaaaataaggctagtccgttatcaacttgaaaaagtggcaccgagtcggtgcgggtgttcactgctggcctccgcagtccccaccacagc

SEQ ID NO: 856 - RNA, 134 nt, synthetic construct
  misc_feature 1..134: note = Description of Artificial Sequence: Synthetic polynucleotide
  source 1..134: mol_type = other RNA
tctggctgtggtggggactggttttagagctagaaatagcaagttaaaataaggctagtccgttatcaacttgaaaaagtggcaccgagtcggtgcaaggggtgttcactgctggcctcagcagtccccaccac

SEQ ID NO: 857 - RNA, 134 nt, synthetic construct
  misc_feature 1..134: note = Description of Artificial Sequence: Synthetic polynucleotide
  source 1..134: mol_type = other RNA
tctggctgtggtggggactggttttagagctagaaatagcaagttaaaataaggctagtccgttatcaacttgaaaaagtggcaccgagtcggtgcggtgttcactgctggcctctgcagtccccaccacagcc

SEQ ID NO: 858 - RNA, 134 nt, synthetic construct
  misc_feature 1..134: note = Description of Artificial Sequence: Synthetic polynucleotide
  source 1..134: mol_type = other RNA
tctggctgtggtggggactggttttagagctagaaatagcaagttaaaataaggctagtccgttatcaacttgaaaaagtggcaccgagtcggtgcggggtgttcactgctggcctcagcagtccccaccacag

SEQ ID NO: 859 - RNA, 134 nt, synthetic construct
  misc_feature 1..134: note = Description of Artificial Sequence: Synthetic polynucleotide
  source 1..134: mol_type = other RNA
tctggctgtggtggggactggttttagagctagaaatagcaagttaaaataaggctagtccgttatcaacttgaaaaagtggcaccgagtcggtgcaggggtgttcactgctggcctctgcagtccccaccaca

SEQ ID NO: 860 - RNA, 134 nt, synthetic construct
  misc_feature 1..134: note = Description of Artificial Sequence: Synthetic polynucleotide
  source 1..134: mol_type = other RNA
tctggctgtggtggggactggttttagagctagaaatagcaagttaaaataaggctagtccgttatcaacttgaaaaagtggcaccgagtcggtgcaaggggtgttcactgctggcctcggcagtccccaccac

SEQ ID NO: 861 - RNA, 135 nt, synthetic construct
  misc_feature 1..135: note = Description of Artificial Sequence: Synthetic polynucleotide
  source 1..135: mol_type = other RNA
tctggctgtggtggggactggttttagagctagaaatagcaagttaaaataaggctagtccgttatcaacttgaaaaagtggcaccgagtcggtgcgggtgttcactgctggcctccgcagtccccaccacagcc

SEQ ID NO: 862 - RNA, 135 nt, synthetic construct
  misc_feature 1..135: note = Description of Artificial Sequence: Synthetic polynucleotide
  source 1..135: mol_type = other RNA
tctggctgtggtggggactggttttagagctagaaatagcaagttaaaataaggctagtccgttatcaacttgaaaaagtggcaccgagtcggtgcgcccaaggggtgttcactgctggcctccgcagtccccac

SEQ ID NO: 863 - RNA, 135 nt, synthetic construct
  misc_feature 1..135: note = Description of Artificial Sequence: Synthetic polynucleotide
  source 1..135: mol_type = other RNA
tctggctgtggtggggactggttttagagctagaaatagcaagttaaaataaggctagtccgttatcaacttgaaaaagtggcaccgagtcggtgcgcccaaggggtgttcactgctggcctctgcagtccccac

SEQ ID NO: 864 - RNA, 135 nt, synthetic construct
  misc_feature 1..135: note = Description of Artificial Sequence: Synthetic polynucleotide
  source 1..135: mol_type = other RNA
gtctggctgtggtggggactggttttagagctagaaatagcaagttaaaataaggctagtccgttatcaacttgaaaaagtggcaccgagtcggtgcggtgttcactgctggcctccgcagtccccacttttttt

SEQ ID NO: 865 - RNA, 135 nt, synthetic construct
  misc_feature 1..135: note = Description of Artificial Sequence: Synthetic polynucleotide
  source 1..135: mol_type = other RNA
tctggctgtggtggggactggttttagagctagaaatagcaagttaaaataaggctagtccgttatcaacttgaaaaagtggcaccgagtcggtgcaaggggtgttcactgctggcctccgcagtccccaccaca

SEQ ID NO: 866 - RNA, 135 nt, synthetic construct
  misc_feature 1..135: note = Description of Artificial Sequence: Synthetic polynucleotide
  source 1..135: mol_type = other RNA
tctggctgtggtggggactggttttagagctagaaatagcaagttaaaataaggctagtccgttatcaacttgaaaaagtggcaccgagtcggtgcggggtgttcactgctggcctctgcagtccccaccacagc

SEQ ID NO: 867 - RNA, 135 nt, synthetic construct
  misc_feature 1..135: note = Description of Artificial Sequence: Synthetic polynucleotide
  source 1..135: mol_type = other RNA
gtctggctgtggtggggactggttttagagctagaaatagcaagttaaaataaggctagtccgttatcaacttgaaaaagtggcaccgagtcggtgcggtgttcactgctggcctctgcagtccccacttttttt

SEQ ID NO: 868 - RNA, 135 nt, synthetic construct
  misc_feature 1..135: note = Description of Artificial Sequence: Synthetic polynucleotide
  source 1..135: mol_type = other RNA
gtctggctgtggtggggactggttttagagctagaaatagcaagttaaaataaggctagtccgttatcaacttgaaaaagtggcaccgagtcggtgcggtgttcactgctggcctcggcagtccccacttttttt

SEQ ID NO: 869 - RNA, 135 nt, synthetic construct
  misc_feature 1..135: note = Description of Artificial Sequence: Synthetic polynucleotide
  source 1..135: mol_type = other RNA
tctggctgtggtggggactggttttagagctagaaatagcaagttaaaataaggctagtccgttatcaacttgaaaaagtggcaccgagtcggtgcgcccaaggggtgttcactgctggcctcagcagtccccac

SEQ ID NO: 870 - RNA, 135 nt, synthetic construct
  misc_feature 1..135: note = Description of Artificial Sequence: Synthetic polynucleotide
  source 1..135: mol_type = other RNA
tctggctgtggtggggactggttttagagctagaaatagcaagttaaaataaggctagtccgttatcaacttgaaaaagtggcaccgagtcggtgcaggggtgttcactgctggcctcggcagtccccaccacag

SEQ ID NO: 871 - RNA, 135 nt, synthetic construct
  misc_feature 1..135: note = Description of Artificial Sequence: Synthetic polynucleotide
  source 1..135: mol_type = other RNA
tctggctgtggtggggactggttttagagctagaaatagcaagttaaaataaggctagtccgttatcaacttgaaaaagtggcaccgagtcggtgcggggtgttcactgctggcctccgcagtccccaccacagc

SEQ ID NO: 872 - RNA, 135 nt, synthetic construct
  misc_feature 1..135: note = Description of Artificial Sequence: Synthetic polynucleotide
  source 1..135: mol_type = other RNA
tctggctgtggtggggactggttttagagctagaaatagcaagttaaaataaggctagtccgttatcaacttgaaaaagtggcaccgagtcggtgcggggtgttcactgctggcctcggcagtccccaccacagc

SEQ ID NO: 873 - RNA, 135 nt, synthetic construct
  misc_feature 1..135: note = Description of Artificial Sequence: Synthetic polynucleotide
  source 1..135: mol_type = other RNA
tctggctgtggtggggactggttttagagctagaaatagcaagttaaaataaggctagtccgttatcaacttgaaaaagtggcaccgagtcggtgcgggtgttcactgctggcctctgcagtccccaccacagcc

SEQ ID NO: 874 - RNA, 135 nt, synthetic construct
  misc_feature 1..135: note = Description of Artificial Sequence: Synthetic polynucleotide
  source 1..135: mol_type = other RNA
tctggctgtggtggggactggttttagagctagaaatagcaagttaaaataaggctagtccgttatcaacttgaaaaagtggcaccgagtcggtgcaaggggtgttcactgctggcctctgcagtccccaccaca

SEQ ID NO: 875 - RNA, 135 nt, synthetic construct
  misc_feature 1..135: note = Description of Artificial Sequence: Synthetic polynucleotide
  source 1..135: mol_type = other RNA
gtctggctgtggtggggactggttttagagctagaaatagcaagttaaaataaggctagtccgttatcaacttgaaaaagtggcaccgagtcggtgcggtgttcactgctggcctcggcagtccccacctttttt

SEQ ID NO: 876 - RNA, 135 nt, synthetic construct
  misc_feature 1..135: note = Description of Artificial Sequence: Synthetic polynucleotide
  source 1..135: mol_type = other RNA
gtctggctgtggtggggactggttttagagctagaaatagcaagttaaaataaggctagtccgttatcaacttgaaaaagtggcaccgagtcggtgcggtgttcactgctggcctctgcagtccccacctttttt

SEQ ID NO: 877 - RNA, 135 nt, synthetic construct
  misc_feature 1..135: note = Description of Artificial Sequence: Synthetic polynucleotide
  source 1..135: mol_type = other RNA
gtctggctgtggtggggactggttttagagctagaaatagcaagttaaaataaggctagtccgttatcaacttgaaaaagtggcaccgagtcggtgcggtgttcactgctggcctccgcagtccccacctttttt

SEQ ID NO: 878 - RNA, 135 nt, synthetic construct
  misc_feature 1..135: note = Description of Artificial Sequence: Synthetic polynucleotide
  source 1..135: mol_type = other RNA
tctggctgtggtggggactggttttagagctagaaatagcaagttaaaataaggctagtccgttatcaacttgaaaaagtggcaccgagtcggtgcgggtgttcactgctggcctcggcagtccccaccacagcc

SEQ ID NO: 879 - RNA, 135 nt, synthetic construct
  misc_feature 1..135: note = Description of Artificial Sequence: Synthetic polynucleotide
  source 1..135: mol_type = other RNA
tctggctgtggtggggactggttttagagctagaaatagcaagttaaaataaggctagtccgttatcaacttgaaaaagtggcaccgagtcggtgcaggggtgttcactgctggcctcagcagtccccaccacag

SEQ ID NO: 880 - RNA, 135 nt, synthetic construct
  misc_feature 1..135: note = Description of Artificial Sequence: Synthetic polynucleotide
  source 1..135: mol_type = other RNA
tctggctgtggtggggactggttttagagctagaaatagcaagttaaaataaggctagtccgttatcaacttgaaaaagtggcaccgagtcggtgcaggggtgttcactgctggcctctgcagtccccaccacag

SEQ ID NO: 881 - RNA, 135 nt, synthetic construct
  misc_feature 1..135: note = Description of Artificial Sequence: Synthetic polynucleotide
  source 1..135: mol_type = other RNA
tctggctgtggtggggactggttttagagctagaaatagcaagttaaaataaggctagtccgttatcaacttgaaaaagtggcaccgagtcggtgcaaggggtgttcactgctggcctcggcagtccccaccaca

SEQ ID NO: 882 - RNA, 135 nt, synthetic construct
  misc_feature 1..135: note = Description of Artificial Sequence: Synthetic polynucleotide
  source 1..135: mol_type = other RNA
tctggctgtggtggggactggttttagagctagaaatagcaagttaaaataaggctagtccgttatcaacttgaaaaagtggcaccgagtcggtgcaggggtgttcactgctggcctccgcagtccccaccacag

SEQ ID NO: 883 - RNA, 135 nt, synthetic construct
  misc_feature 1..135: note = Description of Artificial Sequence: Synthetic polynucleotide
  source 1..135: mol_type = other RNA
tctggctgtggtggggactggttttagagctagaaatagcaagttaaaataaggctagtccgttatcaacttgaaaaagtggcaccgagtcggtgcaaggggtgttcactgctggcctcagcagtccccaccaca

SEQ ID NO: 884 - RNA, 135 nt, synthetic construct
  misc_feature 1..135: note = Description of Artificial Sequence: Synthetic polynucleotide
  source 1..135: mol_type = other RNA
gtctggctgtggtggggactggttttagagctagaaatagcaagttaaaataaggctagtccgttatcaacttgaaaaagtggcaccgagtcggtgcggtgttcactgctggcctcagcagtccccacttttttt

SEQ ID NO: 885 - RNA, 135 nt, synthetic construct
  misc_feature 1..135: note = Description of Artificial Sequence: Synthetic polynucleotide
  source 1..135: mol_type = other RNA
tctggctgtggtggggactggttttagagctagaaatagcaagttaaaataaggctagtccgttatcaacttgaaaaagtggcaccgagtcggtgcgcccaaggggtgttcactgctggcctcggcagtccccac

SEQ ID NO: 886 - RNA, 135 nt, synthetic construct
  misc_feature 1..135: note = Description of Artificial Sequence: Synthetic polynucleotide
  source 1..135: mol_type = other RNA
gtctggctgtggtggggactggttttagagctagaaatagcaagttaaaataaggctagtccgttatcaacttgaaaaagtggcaccgagtcggtgcggtgttcactgctggcctcagcagtccccacctttttt

SEQ ID NO: 887 - RNA, 135 nt, synthetic construct
  misc_feature 1..135: note = Description of Artificial Sequence: Synthetic polynucleotide
  source 1..135: mol_type = other RNA
tctggctgtggtggggactggttttagagctagaaatagcaagttaaaataaggctagtccgttatcaacttgaaaaagtggcaccgagtcggtgcgggtgttcactgctggcctcagcagtccccaccacagcc

SEQ ID NO: 888 - RNA, 135 nt, synthetic construct
  misc_feature 1..135: note = Description of Artificial Sequence: Synthetic polynucleotide
  source 1..135: mol_type = other RNA
tctggctgtggtggggactggttttagagctagaaatagcaagttaaaataaggctagtccgttatcaacttgaaaaagtggcaccgagtcggtgcggggtgttcactgctggcctcagcagtccccaccacagc

SEQ ID NO: 889 - RNA, 136 nt, synthetic construct
  misc_feature 1..136: note = Description of Artificial Sequence: Synthetic polynucleotide
  source 1..136: mol_type = other RNA
gtctggctgtggtggggactggttttagagctagaaatagcaagttaaaataaggctagtccgttatcaacttgaaaaagtggcaccgagtcggtgcggtgttcactgctggcctcagcagtccccaccttttttt

SEQ ID NO: 890 - RNA, 136 nt, synthetic construct
  misc_feature 1..136: note = Description of Artificial Sequence: Synthetic polynucleotide
  source 1..136: mol_type = other RNA
tctggctgtggtggggactggttttagagctagaaatagcaagttaaaataaggctagtccgttatcaacttgaaaaagtggcaccgagtcggtgcaggggtgttcactgctggcctcagcagtccccaccacagc

SEQ ID NO: 891 - RNA, 136 nt, synthetic construct
  misc_feature 1..136: note = Description of Artificial Sequence: Synthetic polynucleotide
  source 1..136: mol_type = other RNA
gtctggctgtggtggggactggttttagagctagaaatagcaagttaaaataaggctagtccgttatcaacttgaaaaagtggcaccgagtcggtgcggtgttcactgctggcctcggcagtccccaccttttttt

SEQ ID NO: 892 - RNA, 136 nt, synthetic construct
  misc_feature 1..136: note = Description of Artificial Sequence: Synthetic polynucleotide
  source 1..136: mol_type = other RNA
gtctggctgtggtggggactggttttagagctagaaatagcaagttaaaataaggctagtccgttatcaacttgaaaaagtggcaccgagtcggtgcgggtgttcactgctggcctctgcagtccccacctttttt

SEQ ID NO: 893 - RNA, 136 nt, synthetic construct
  misc_feature 1..136: note = Description of Artificial Sequence: Synthetic polynucleotide
  source 1..136: mol_type = other RNA
tctggctgtggtggggactggttttagagctagaaatagcaagttaaaataaggctagtccgttatcaacttgaaaaagtggcaccgagtcggtgcggggtgttcactgctggcctcggcagtccccaccacagcc

SEQ ID NO: 894 - RNA, 136 nt, synthetic construct
  misc_feature 1..136: note = Description of Artificial Sequence: Synthetic polynucleotide
  source 1..136: mol_type = other RNA
tctggctgtggtggggactggttttagagctagaaatagcaagttaaaataaggctagtccgttatcaacttgaaaaagtggcaccgagtcggtgcaggggtgttcactgctggcctcggcagtccccaccacagc

SEQ ID NO: 895 - RNA, 136 nt, synthetic construct
  misc_feature 1..136: note = Description of Artificial Sequence: Synthetic polynucleotide
  source 1..136: mol_type = other RNA
tctggctgtggtggggactggttttagagctagaaatagcaagttaaaataaggctagtccgttatcaacttgaaaaagtggcaccgagtcggtgcgcccaaggggtgttcactgctggcctcagcagtccccacc

SEQ ID NO: 896 - RNA, 136 nt, synthetic construct
  misc_feature 1..136: note = Description of Artificial Sequence: Synthetic polynucleotide
  source 1..136: mol_type = other RNA
tctggctgtggtggggactggttttagagctagaaatagcaagttaaaataaggctagtccgttatcaacttgaaaaagtggcaccgagtcggtgcaaggggtgttcactgctggcctccgcagtccccaccacag

SEQ ID NO: 897 - RNA, 136 nt, synthetic construct
  misc_feature 1..136: note = Description of Artificial Sequence: Synthetic polynucleotide
  source 1..136: mol_type = other RNA
tctggctgtggtggggactggttttagagctagaaatagcaagttaaaataaggctagtccgttatcaacttgaaaaagtggcaccgagtcggtgcaggggtgttcactgctggcctctgcagtccccaccacagc

SEQ ID NO: 898 - RNA, 136 nt, synthetic construct
  misc_feature 1..136: note = Description of Artificial Sequence: Synthetic polynucleotide
  source 1..136: mol_type = other RNA
tctggctgtggtggggactggttttagagctagaaatagcaagttaaaataaggctagtccgttatcaacttgaaaaagtggcaccgagtcggtgcggtgttcactgctggcctcagcagtccccaccacagccag

SEQ ID NO: 899 - RNA, 136 nt, synthetic construct
  misc_feature 1..136: note = Description of Artificial Sequence: Synthetic polynucleotide
  source 1..136: mol_type = other RNA
gtctggctgtggtggggactggttttagagctagaaatagcaagttaaaataaggctagtccgttatcaacttgaaaaagtggcaccgagtcggtgcgggtgttcactgctggcctcggcagtccccacttttttt

SEQ ID NO: 900 - RNA, 136 nt, synthetic construct
  misc_feature 1..136: note = Description of Artificial Sequence: Synthetic polynucleotide
  source 1..136: mol_type = other RNA
tctggctgtggtggggactggttttagagctagaaatagcaagttaaaataaggctagtccgttatcaacttgaaaaagtggcaccgagtcggtgcaaggggtgttcactgctggcctcggcagtccccaccacag

SEQ ID NO: 901 - RNA, 136 nt, synthetic construct
  misc_feature 1..136: note = Description of Artificial Sequence: Synthetic polynucleotide
  source 1..136: mol_type = other RNA
gtctggctgtggtggggactggttttagagctagaaatagcaagttaaaataaggctagtccgttatcaacttgaaaaagtggcaccgagtcggtgcgggtgttcactgctggcctccgcagtccccacctttttt

SEQ ID NO: 902 - RNA, 136 nt, synthetic construct
  misc_feature 1..136: note = Description of Artificial Sequence: Synthetic polynucleotide
  source 1..136: mol_type = other RNA
tctggctgtggtggggactggttttagagctagaaatagcaagttaaaataaggctagtccgttatcaacttgaaaaagtggcaccgagtcggtgcggtgttcactgctggcctcggcagtccccaccacagccag

SEQ ID NO: 903 - RNA, 136 nt, synthetic construct
  misc_feature 1..136: note = Description of Artificial Sequence: Synthetic polynucleotide
  source 1..136: mol_type = other RNA
gtctggctgtggtggggactggttttagagctagaaatagcaagttaaaataaggctagtccgttatcaacttgaaaaagtggcaccgagtcggtgcgggtgttcactgctggcctccgcagtccccacttttttt

SEQ ID NO: 904 - RNA, 136 nt, synthetic construct
  misc_feature 1..136: note = Description of Artificial Sequence: Synthetic polynucleotide
  source 1..136: mol_type = other RNA
gtctggctgtggtggggactggttttagagctagaaatagcaagttaaaataaggctagtccgttatcaacttgaaaaagtggcaccgagtcggtgcgggtgttcactgctggcctctgcagtccccacttttttt

SEQ ID NO: 905 - RNA, 136 nt, synthetic construct
  misc_feature 1..136: note = Description of Artificial Sequence: Synthetic polynucleotide
  source 1..136: mol_type = other RNA
tctggctgtggtggggactggttttagagctagaaatagcaagttaaaataaggctagtccgttatcaacttgaaaaagtggcaccgagtcggtgcggtgttcactgctggcctctgcagtccccaccacagccag

SEQ ID NO: 906 - RNA, 136 nt, synthetic construct
  misc_feature 1..136: note = Description of Artificial Sequence: Synthetic polynucleotide
  source 1..136: mol_type = other RNA
tctggctgtggtggggactggttttagagctagaaatagcaagttaaaataaggctagtccgttatcaacttgaaaaagtggcaccgagtcggtgcggggtgttcactgctggcctccgcagtccccaccacagcc

SEQ ID NO: 907 - RNA, 136 nt, synthetic construct
  misc_feature 1..136: note = Description of Artificial Sequence: Synthetic polynucleotide
  source 1..136: mol_type = other RNA
gtctggctgtggtggggactggttttagagctagaaatagcaagttaaaataaggctagtccgttatcaacttgaaaaagtggcaccgagtcggtgcgggtgttcactgctggcctcagcagtccccacctttttt

SEQ ID NO: 908 - RNA, 136 nt, synthetic construct
  misc_feature 1..136: note = Description of Artificial Sequence: Synthetic polynucleotide
  source 1..136: mol_type = other RNA
tctggctgtggtggggactggttttagagctagaaatagcaagttaaaataaggctagtccgttatcaacttgaaaaagtggcaccgagtcggtgcaaggggtgttcactgctggcctcagcagtccccaccacag

SEQ ID NO: 909 - RNA, 136 nt, synthetic construct
  misc_feature 1..136: note = Description of Artificial Sequence: Synthetic polynucleotide
  source 1..136: mol_type = other RNA
tctggctgtggtggggactggttttagagctagaaatagcaagttaaaataaggctagtccgttatcaacttgaaaaagtggcaccgagtcggtgcgcccaaggggtgttcactgctggcctctgcagtccccacc

SEQ ID NO: 910 - RNA, 136 nt, synthetic construct
  misc_feature 1..136: note = Description of Artificial Sequence: Synthetic polynucleotide
  source 1..136: mol_type = other RNA
tctggctgtggtggggactggttttagagctagaaatagcaagttaaaataaggctagtccgttatcaacttgaaaaagtggcaccgagtcggtgcaggggtgttcactgctggcctccgcagtccccaccacagc

SEQ ID NO: 911 - RNA, 136 nt, synthetic construct
  misc_feature 1..136: note = Description of Artificial Sequence: Synthetic polynucleotide
  source 1..136: mol_type = other RNA
tctggctgtggtggggactggttttagagctagaaatagcaagttaaaataaggctagtccgttatcaacttgaaaaagtggcaccgagtcggtgcgcccaaggggtgttcactgctggcctccgcagtccccacc

SEQ ID NO: 912 - RNA, 136 nt, synthetic construct
  misc_feature 1..136: note = Description of Artificial Sequence: Synthetic polynucleotide
  source 1..136: mol_type = other RNA
tctggctgtggtggggactggttttagagctagaaatagcaagttaaaataaggctagtccgttatcaacttgaaaaagtggcaccgagtcggtgcggggtgttcactgctggcctctgcagtccccaccacagcc

SEQ ID NO: 913 - RNA, 136 nt, synthetic construct
  misc_feature 1..136: note = Description of Artificial Sequence: Synthetic polynucleotide
  source 1..136: mol_type = other RNA
gtctggctgtggtggggactggttttagagctagaaatagcaagttaaaataaggctagtccgttatcaacttgaaaaagtggcaccgagtcggtgcggtgttcactgctggcctccgcagtccccaccttttttt

SEQ ID NO: 914 - RNA, 136 nt, synthetic construct
  misc_feature 1..136: note = Description of Artificial Sequence: Synthetic polynucleotide
  source 1..136: mol_type = other RNA
tctggctgtggtggggactggttttagagctagaaatagcaagttaaaataaggctagtccgttatcaacttgaaaaagtggcaccgagtcggtgcggtgttcactgctggcctccgcagtccccaccacagccag

SEQ ID NO: 915 - RNA, 136 nt, synthetic construct
  misc_feature 1..136: note = Description of Artificial Sequence: Synthetic polynucleotide
  source 1..136: mol_type = other RNA
gtctggctgtggtggggactggttttagagctagaaatagcaagttaaaataaggctagtccgttatcaacttgaaaaagtggcaccgagtcggtgcgggtgttcactgctggcctcggcagtccccacctttttt

SEQ ID NO: 916 - RNA, 136 nt, synthetic construct
  misc_feature 1..136: note = Description of Artificial Sequence: Synthetic polynucleotide
  source 1..136: mol_type = other RNA
tctggctgtggtggggactggttttagagctagaaatagcaagttaaaataaggctagtccgttatcaacttgaaaaagtggcaccgagtcggtgcggggtgttcactgctggcctcagcagtccccaccacagcc

SEQ ID NO: 917 - RNA, 136 nt, synthetic construct
  misc_feature 1..136: note = Description of Artificial Sequence: Synthetic polynucleotide
  source 1..136: mol_type = other RNA
gtctggctgtggtggggactggttttagagctagaaatagcaagttaaaataaggctagtccgttatcaacttgaaaaagtggcaccgagtcggtgcgggtgttcactgctggcctcagcagtccccacttttttt

SEQ ID NO: 918 - RNA, 136 nt, synthetic construct
  misc_feature 1..136: note = Description of Artificial Sequence: Synthetic polynucleotide
  source 1..136: mol_type = other RNA
tctggctgtggtggggactggttttagagctagaaatagcaagttaaaataaggctagtccgttatcaacttgaaaaagtggcaccgagtcggtgcgcccaaggggtgttcactgctggcctcggcagtccccacc

SEQ ID NO: 919 - RNA, 136 nt, synthetic construct
  misc_feature 1..136: note = Description of Artificial Sequence: Synthetic polynucleotide
  source 1..136: mol_type = other RNA
gtctggctgtggtggggactggttttagagctagaaatagcaagttaaaataaggctagtccgttatcaacttgaaaaagtggcaccgagtcggtgcggtgttcactgctggcctctgcagtccccaccttttttt

SEQ ID NO: 920 - RNA, 136 nt, synthetic construct
  misc_feature 1..136: note = Description of Artificial Sequence: Synthetic polynucleotide
  source 1..136: mol_type = other RNA
tctggctgtggtggggactggttttagagctagaaatagcaagttaaaataaggctagtccgttatcaacttgaaaaagtggcaccgagtcggtgcaaggggtgttcactgctggcctctgcagtccccaccacag

SEQ ID NO: 921 - RNA, 137 nt, synthetic construct
  misc_feature 1..137: note = Description of Artificial Sequence: Synthetic polynucleotide
  source 1..137: mol_type = other RNA
gtctggctgtggtggggactggttttagagctagaaatagcaagttaaaataaggctagtccgttatcaacttgaaaaagtggcaccgagtcggtgcggggtgttcactgctggcctctgcagtccccacctttttt

SEQ ID NO: 922 - RNA, 137 nt, synthetic construct
  misc_feature 1..137: note = Description of Artificial Sequence: Synthetic polynucleotide
  source 1..137: mol_type = other RNA
tctggctgtggtggggactggttttagagctagaaatagcaagttaaaataaggctagtccgttatcaacttgaaaaagtggcaccgagtcggtgcgcccaaggggtgttcactgctggcctccgcagtccccacca

SEQ ID NO: 923 - RNA, 137 nt, synthetic construct
  misc_feature 1..137: note = Description of Artificial Sequence: Synthetic polynucleotide
  source 1..137: mol_type = other RNA
tctggctgtggtggggactggttttagagctagaaatagcaagttaaaataaggctagtccgttatcaacttgaaaaagtggcaccgagtcggtgcaggggtgttcactgctggcctcggcagtccccaccacagcc

SEQ ID NO: 924 - RNA, 137 nt, synthetic construct
  misc_feature 1..137: note = Description of Artificial Sequence: Synthetic polynucleotide
  source 1..137: mol_type = other RNA
tctggctgtggtggggactggttttagagctagaaatagcaagttaaaataaggctagtccgttatcaacttgaaaaagtggcaccgagtcggtgcacgcccaaggggtgttcactgctggcctcagcagtccccac

SEQ ID NO: 925 - RNA, 137 nt, synthetic construct
  misc_feature 1..137: note = Description of Artificial Sequence: Synthetic polynucleotide
  source 1..137: mol_type = other RNA
tctggctgtggtggggactggttttagagctagaaatagcaagttaaaataaggctagtccgttatcaacttgaaaaagtggcaccgagtcggtgcacgcccaaggggtgttcactgctggcctcggcagtccccac

SEQ ID NO: 926 - RNA, 137 nt, synthetic construct
  misc_feature 1..137: note = Description of Artificial Sequence: Synthetic polynucleotide
  source 1..137: mol_type = other RNA
tctggctgtggtggggactggttttagagctagaaatagcaagttaaaataaggctagtccgttatcaacttgaaaaagtggcaccgagtcggtgcgggtgttcactgctggcctccgcagtccccaccacagccag

SEQ ID NO: 927 - RNA, 137 nt, synthetic construct
  misc_feature 1..137: note = Description of Artificial Sequence: Synthetic polynucleotide
  source 1..137: mol_type = other RNA
tctggctgtggtggggactggttttagagctagaaatagcaagttaaaataaggctagtccgttatcaacttgaaaaagtggcaccgagtcggtgcgggtgttcactgctggcctctgcagtccccaccacagccag

SEQ ID NO: 928 - RNA, 137 nt, synthetic construct
  misc_feature 1..137: note = Description of Artificial Sequence: Synthetic polynucleotide
  source 1..137: mol_type = other RNA
tctggctgtggtggggactggttttagagctagaaatagcaagttaaaataaggctagtccgttatcaacttgaaaaagtggcaccgagtcggtgcgcccaaggggtgttcactgctggcctcggcagtccccacca

SEQ ID NO: 929 - RNA, 137 nt, synthetic construct
  misc_feature 1..137: note = Description of Artificial Sequence: Synthetic polynucleotide
  source 1..137: mol_type = other RNA
tctggctgtggtggggactggttttagagctagaaatagcaagttaaaataaggctagtccgttatcaacttgaaaaagtggcaccgagtcggtgcaggggtgttcactgctggcctccgcagtccccaccacagcc

SEQ ID NO: 930 - RNA, 137 nt, synthetic construct
  misc_feature 1..137: note = Description of Artificial Sequence: Synthetic polynucleotide
  source 1..137: mol_type = other RNA
tctggctgtggtggggactggttttagagctagaaatagcaagttaaaataaggctagtccgttatcaacttgaaaaagtggcaccgagtcggtgcacgcccaaggggtgttcactgctggcctccgcagtccccac

SEQ ID NO: 931 - RNA, 137 nt, synthetic construct
  misc_feature 1..137: note = Description of Artificial Sequence: Synthetic polynucleotide
  source 1..137: mol_type = other RNA
tctggctgtggtggggactggttttagagctagaaatagcaagttaaaataaggctagtccgttatcaacttgaaaaagtggcaccgagtcggtgcgcccaaggggtgttcactgctggcctctgcagtccccacca

SEQ ID NO: 932 - RNA, 137 nt, synthetic construct
  misc_feature 1..137: note = Description of Artificial Sequence: Synthetic polynucleotide
  source 1..137: mol_type = other RNA
tctggctgtggtggggactggttttagagctagaaatagcaagttaaaataaggctagtccgttatcaacttgaaaaagtggcaccgagtcggtgcgcccaaggggtgttcactgctggcctcagcagtccccacca

SEQ ID NO: 933 - RNA, 137 nt, synthetic construct
  misc_feature 1..137: note = Description of Artificial Sequence: Synthetic polynucleotide
  source 1..137: mol_type = other RNA
tctggctgtggtggggactggttttagagctagaaatagcaagttaaaataaggctagtccgttatcaacttgaaaaagtggcaccgagtcggtgcaaggggtgttcactgctggcctcggcagtccccaccacagc

SEQ ID NO: 934 - RNA, 137 nt, synthetic construct
  misc_feature 1..137: note = Description of Artificial Sequence: Synthetic polynucleotide
  source 1..137: mol_type = other RNA
tctggctgtggtggggactggttttagagctagaaatagcaagttaaaataaggctagtccgttatcaacttgaaaaagtggcaccgagtcggtgcaggggtgttcactgctggcctcagcagtccccaccacagcc

SEQ ID NO: 935 - RNA, 137 nt, synthetic construct
  misc_feature 1..137: note = Description of Artificial Sequence: Synthetic polynucleotide
  source 1..137: mol_type = other RNA
tctggctgtggtggggactggttttagagctagaaatagcaagttaaaataaggctagtccgttatcaacttgaaaaagtggcaccgagtcggtgcgggtgttcactgctggcctcagcagtccccaccacagccag

SEQ ID NO: 936 - RNA, 137 nt, synthetic construct
  misc_feature 1..137: note = Description of Artificial Sequence: Synthetic polynucleotide
  source 1..137: mol_type = other RNA
tctggctgtggtggggactggttttagagctagaaatagcaagttaaaataaggctagtccgttatcaacttgaaaaagtggcaccgagtcggtgcaaggggtgttcactgctggcctccgcagtccccaccacagc

SEQ ID NO: 937 - RNA, 137 nt, synthetic construct
  misc_feature 1..137: note = Description of Artificial Sequence: Synthetic polynucleotide
  source 1..137: mol_type = other RNA
tctggctgtggtggggactggttttagagctagaaatagcaagttaaaataaggctagtccgttatcaacttgaaaaagtggcaccgagtcggtgcaaggggtgttcactgctggcctcagcagtccccaccacagc

SEQ ID NO: 938 - RNA, 137 nt, synthetic construct
  misc_feature 1..137: note = Description of Artificial Sequence: Synthetic polynucleotide
  source 1..137: mol_type = other RNA
tctggctgtggtggggactggttttagagctagaaatagcaagttaaaataaggctagtccgttatcaacttgaaaaagtggcaccgagtcggtgcgggtgttcactgctggcctcggcagtccccaccacagccag

SEQ ID NO: 939 - RNA, 137 nt, synthetic construct
  misc_feature 1..137: note = Description of Artificial Sequence: Synthetic polynucleotide
  source 1..137: mol_type = other RNA
tctggctgtggtggggactggttttagagctagaaatagcaagttaaaataaggctagtccgttatcaacttgaaaaagtggcaccgagtcggtgcaaggggtgttcactgctggcctctgcagtccccaccacagc

SEQ ID NO: 940 - RNA, 137 nt, synthetic construct
  misc_feature 1..137: note = Description of Artificial Sequence: Synthetic polynucleotide
  source 1..137: mol_type = other RNA
gtctggctgtggtggggactggttttagagctagaaatagcaagttaaaataaggctagtccgttatcaacttgaaaaagtggcaccgagtcggtgcggtgttcactgctggcctcggcagtccccaccattttttt

SEQ ID NO: 941 - RNA, 137 nt, synthetic construct
  misc_feature 1..137: note = Description of Artificial Sequence: Synthetic polynucleotide
  source 1..137: mol_type = other RNA
gtctggctgtggtggggactggttttagagctagaaatagcaagttaaaataaggctagtccgttatcaacttgaaaaagtggcaccgagtcggtgcggggtgttcactgctggcctcggcagtccccacttttttt

SEQ ID NO: 942 - RNA, 137 nt, synthetic construct
  misc_feature 1..137: note = Description of Artificial Sequence: Synthetic polynucleotide
  source 1..137: mol_type = other RNA
gtctggctgtggtggggactggttttagagctagaaatagcaagttaaaataaggctagtccgttatcaacttgaaaaagtggcaccgagtcggtgcggtgttcactgctggcctccgcagtccccaccattttttt

SEQ ID NO: 943 - RNA, 137 nt, synthetic construct
  misc_feature 1..137: note = Description of Artificial Sequence: Synthetic polynucleotide
  source 1..137: mol_type = other RNA
gtctggctgtggtggggactggttttagagctagaaatagcaagttaaaataaggctagtccgttatcaacttgaaaaagtggcaccgagtcggtgcggggtgttcactgctggcctccgcagtccccacctttttt

SEQ ID NO: 944 - RNA, 137 nt, synthetic construct
  misc_feature 1..137: note = Description of Artificial Sequence: Synthetic polynucleotide
  source 1..137: mol_type = other RNA
gtctggctgtggtggggactggttttagagctagaaatagcaagttaaaataaggctagtccgttatcaacttgaaaaagtggcaccgagtcggtgcggggtgttcactgctggcctccgcagtccccacttttttt

SEQ ID NO: 945 - RNA, 137 nt, synthetic construct
  misc_feature 1..137: note = Description of Artificial Sequence: Synthetic polynucleotide
  source 1..137: mol_type = other RNA
gtctggctgtggtggggactggttttagagctagaaatagcaagttaaaataaggctagtccgttatcaacttgaaaaagtggcaccgagtcggtgcgggtgttcactgctggcctcagcagtccccaccttttttt

SEQ ID NO: 946 - RNA, 137 nt, synthetic construct
  misc_feature 1..137: note = Description of Artificial Sequence: Synthetic polynucleotide
  source 1..137: mol_type = other RNA
gtctggctgtggtggggactggttttagagctagaaatagcaagttaaaataaggctagtccgttatcaacttgaaaaagtggcaccgagtcggtgcggggtgttcactgctggcctctgcagtccccacttttttt

SEQ ID NO: 947 - RNA, 137 nt, synthetic construct
  misc_feature 1..137: note = Description of Artificial Sequence: Synthetic polynucleotide
  source 1..137: mol_type = other RNA
gtctggctgtggtggggactggttttagagctagaaatagcaagttaaaataaggctagtccgttatcaacttgaaaaagtggcaccgagtcggtgcgggtgttcactgctggcctctgcagtccccaccttttttt

SEQ ID NO: 948 - RNA, 137 nt, synthetic construct
  misc_feature 1..137: note = Description of Artificial Sequence: Synthetic polynucleotide
  source 1..137: mol_type = other RNA
gtctggctgtggtggggactggttttagagctagaaatagcaagttaaaataaggctagtccgttatcaacttgaaaaagtggcaccgagtcggtgcggtgttcactgctggcctcagcagtccccaccactttttt

SEQ ID NO: 949 - RNA, 137 nt, synthetic construct
  misc_feature 1..137: note = Description of Artificial Sequence: Synthetic polynucleotide
  source 1..137: mol_type = other RNA
gtctggctgtggtggggactggttttagagctagaaatagcaagttaaaataaggctagtccgttatcaacttgaaaaagtggcaccgagtcggtgcgggtgttcactgctggcctcggcagtccccaccttttttt

SEQ ID NO: 950 - RNA, 137 nt, synthetic construct
  misc_feature 1..137: note = Description of Artificial Sequence: Synthetic polynucleotide
  source 1..137: mol_type = other RNA
gtctggctgtggtggggactggttttagagctagaaatagcaagttaaaataaggctagtccgttatcaacttgaaaaagtggcaccgagtcggtgcgggtgttcactgctggcctccgcagtccccaccttttttt

SEQ ID NO: 951 - RNA, 137 nt, synthetic construct
  misc_feature 1..137: note = Description of Artificial Sequence: Synthetic polynucleotide
  source 1..137: mol_type = other RNA
gtctggctgtggtggggactggttttagagctagaaatagcaagttaaaataaggctagtccgttatcaacttgaaaaagtggcaccgagtcggtgcggtgttcactgctggcctccgcagtccccaccactttttt

SEQ ID NO: 952 - RNA, 137 nt, synthetic construct
  misc_feature 1..137: note = Description of Artificial Sequence: Synthetic polynucleotide
  source 1..137: mol_type = other RNA
gtctggctgtggtggggactggttttagagctagaaatagcaagttaaaataaggctagtccgttatcaacttgaaaaagtggcaccgagtcggtgcggtgttcactgctggcctcagcagtccccaccattttttt

SEQ ID NO: 953 - RNA, 137 nt, synthetic construct
  misc_feature 1..137: note = Description of Artificial Sequence: Synthetic polynucleotide
  source 1..137: mol_type = other RNA
gtctggctgtggtggggactggttttagagctagaaatagcaagttaaaataaggctagtccgttatcaacttgaaaaagtggcaccgagtcggtgcggtgttcactgctggcctctgcagtccccaccactttttt

SEQ ID NO: 954 - RNA, 137 nt, synthetic construct
  misc_feature 1..137: note = Description of Artificial Sequence: Synthetic polynucleotide
  source 1..137: mol_type = other RNA
gtctggctgtggtggggactggttttagagctagaaatagcaagttaaaataaggctagtccgttatcaacttgaaaaagtggcaccgagtcggtgcggggtgttcactgctggcctcagcagtccccacttttttt

SEQ ID NO: 955 - RNA, 137 nt, synthetic construct
  misc_feature 1..137: note = Description of Artificial Sequence: Synthetic polynucleotide
  source 1..137: mol_type = other RNA
gtctggctgtggtggggactggttttagagctagaaatagcaagttaaaataaggctagtccgttatcaacttgaaaaagtggcaccgagtcggtgcggtgttcactgctggcctcggcagtccccaccactttttt

SEQ ID NO: 956 - RNA, 137 nt, synthetic construct
  misc_feature 1..137: note = Description of Artificial Sequence: Synthetic polynucleotide
  source 1..137: mol_type = other RNA
gtctggctgtggtggggactggttttagagctagaaatagcaagttaaaataaggctagtccgttatcaacttgaaaaagtggcaccgagtcggtgcggtgttcactgctggcctctgcagtccccaccattttttt

SEQ ID NO: 957 - RNA, 137 nt, synthetic construct
  misc_feature 1..137: note = Description of Artificial Sequence: Synthetic polynucleotide
  source 1..137: mol_type = other RNA
gtctggctgtggtggggactggttttagagctagaaatagcaagttaaaataaggctagtccgttatcaacttgaaaaagtggcaccgagtcggtgcggggtgttcactgctggcctcagcagtccccacctttttt

SEQ ID NO: 958 - RNA, 137 nt, synthetic construct
  misc_feature 1..137: note = Description of Artificial Sequence: Synthetic polynucleotide
  source 1..137: mol_type = other RNA
gtctggctgtggtggggactggttttagagctagaaatagcaagttaaaataaggctagtccgttatcaacttgaaaaagtggcaccgagtcggtgcggggtgttcactgctggcctcggcagtccccacctttttt

SEQ ID NO: 959 - RNA, 137 nt, synthetic construct
  misc_feature 1..137: note = Description of Artificial Sequence: Synthetic polynucleotide
  source 1..137: mol_type = other RNA
tctggctgtggtggggactggttttagagctagaaatagcaagttaaaataaggctagtccgttatcaacttgaaaaagtggcaccgagtcggtgcacgcccaaggggtgttcactgctggcctctgcagtccccac

SEQ ID NO: 960 - RNA, 137 nt, synthetic construct
  misc_feature 1..137: note = Description of Artificial Sequence: Synthetic polynucleotide
  source 1..137: mol_type = other RNA
tctggctgtggtggggactggttttagagctagaaatagcaagttaaaataaggctagtccgttatcaacttgaaaaagtggcaccgagtcggtgcaggggtgttcactgctggcctctgcagtccccaccacagcc

SEQ ID NO: 961 - RNA, 138 nt, synthetic construct
  misc_feature 1..138: note = Description of Artificial Sequence: Synthetic polynucleotide
  source 1..138: mol_type = other RNA
tctggctgtggtggggactggttttagagctagaaatagcaagttaaaataaggctagtccgttatcaacttgaaaaagtggcaccgagtcggtgcaaggggtgttcactgctggcctctgcagtccccaccacagcc

SEQ ID NO: 962 - RNA, 138 nt, synthetic construct
  misc_feature 1..138: note = Description of Artificial Sequence: Synthetic polynucleotide
  source 1..138: mol_type = other RNA
tctggctgtggtggggactggttttagagctagaaatagcaagttaaaataaggctagtccgttatcaacttgaaaaagtggcaccgagtcggtgcacgcccaaggggtgttcactgctggcctcagcagtccccacc

SEQ ID NO: 963 - RNA, 138 nt, synthetic construct
  misc_feature 1..138: note = Description of Artificial Sequence: Synthetic polynucleotide
  source 1..138: mol_type = other RNA
tctggctgtggtggggactggttttagagctagaaatagcaagttaaaataaggctagtccgttatcaacttgaaaaagtggcaccgagtcggtgcggggtgttcactgctggcctcggcagtccccaccacagccag

SEQ ID NO: 964 - RNA, 138 nt, synthetic construct
  misc_feature 1..138: note = Description of Artificial Sequence: Synthetic polynucleotide
  source 1..138: mol_type = other RNA
gtctggctgtggtggggactggttttagagctagaaatagcaagttaaaataaggctagtccgttatcaacttgaaaaagtggcaccgagtcggtgcggggtgttcactgctggcctctgcagtccccaccttttttt

SEQ ID NO: 965 - RNA, 138 nt, synthetic construct
  misc_feature 1..138: note = Description of Artificial Sequence: Synthetic polynucleotide
  source 1..138: mol_type = other RNA
tctggctgtggtggggactggttttagagctagaaatagcaagttaaaataaggctagtccgttatcaacttgaaaaagtggcaccgagtcggtgcacgcccaaggggtgttcactgctggcctcggcagtccccacc

SEQ ID NO: 966 - RNA, 138 nt, synthetic construct
  misc_feature 1..138: note = Description of Artificial Sequence: Synthetic polynucleotide
  source 1..138: mol_type = other RNA
tctggctgtggtggggactggttttagagctagaaatagcaagttaaaataaggctagtccgttatcaacttgaaaaagtggcaccgagtcggtgcacgcccaaggggtgttcactgctggcctctgcagtccccacc

SEQ ID NO: 967 - RNA, 138 nt, synthetic construct
  misc_feature 1..138: note = Description of Artificial Sequence: Synthetic polynucleotide
  source 1..138: mol_type = other RNA
tctggctgtggtggggactggttttagagctagaaatagcaagttaaaataaggctagtccgttatcaacttgaaaaagtggcaccgagtcggtgcgcccaaggggtgttcactgctggcctcagcagtccccaccac

SEQ ID NO: 968 - RNA, 138 nt, synthetic construct
  misc_feature 1..138: note = Description of Artificial Sequence: Synthetic polynucleotide
  source 1..138: mol_type = other RNA
gtctggctgtggtggggactggttttagagctagaaatagcaagttaaaataaggctagtccgttatcaacttgaaaaagtggcaccgagtcggtgcgggtgttcactgctggcctctgcagtccccaccactttttt

SEQ ID NO: 969 - RNA, 138 nt, synthetic construct
  misc_feature 1..138: note = Description of Artificial Sequence: Synthetic polynucleotide
  source 1..138: mol_type = other RNA
gtctggctgtggtggggactggttttagagctagaaatagcaagttaaaataaggctagtccgttatcaacttgaaaaagtggcaccgagtcggtgcggtgttcactgctggcctctgcagtccccaccacttttttt

SEQ ID NO: 970 - RNA, 138 nt, synthetic construct
  misc_feature 1..138: note = Description of Artificial Sequence: Synthetic polynucleotide
  source 1..138: mol_type = other RNA
tctggctgtggtggggactggttttagagctagaaatagcaagttaaaataaggctagtccgttatcaacttgaaaaagtggcaccgagtcggtgcggggtgttcactgctggcctcagcagtccccaccacagccag

SEQ ID NO: 971 - RNA, 138 nt, synthetic construct
  misc_feature 1..138: note = Description of Artificial Sequence: Synthetic polynucleotide
  source 1..138: mol_type = other RNA
tctggctgtggtggggactggttttagagctagaaatagcaagttaaaataaggctagtccgttatcaacttgaaaaagtggcaccgagtcggtgcaaggggtgttcactgctggcctcagcagtccccaccacagcc

SEQ ID NO: 972 - RNA, 138 nt, synthetic construct
  misc_feature 1..138: note = Description of Artificial Sequence: Synthetic polynucleotide
  source 1..138: mol_type = other RNA
gtctggctgtggtggggactggttttagagctagaaatagcaagttaaaataaggctagtccgttatcaacttgaaaaagtggcaccgagtcggtgcggtgttcactgctggcctccgcagtccccaccacttttttt

SEQ ID NO: 973 - RNA, 138 nt, synthetic construct
  misc_feature 1..138: note = Description of Artificial Sequence: Synthetic polynucleotide
  source 1..138: mol_type = other RNA
gtctggctgtggtggggactggttttagagctagaaatagcaagttaaaataaggctagtccgttatcaacttgaaaaagtggcaccgagtcggtgcaggggtgttcactgctggcctcggcagtccccacctttttt

SEQ ID NO: 974 - RNA, 138 nt, synthetic construct
  misc_feature 1..138: note = Description of Artificial Sequence: Synthetic polynucleotide
  source 1..138: mol_type = other RNA
gtctggctgtggtggggactggttttagagctagaaatagcaagttaaaataaggctagtccgttatcaacttgaaaaagtggcaccgagtcggtgcaggggtgttcactgctggcctcagcagtccccacctttttt

SEQ ID NO: 975 - RNA, 138 nt, synthetic construct
  misc_feature 1..138: note = Description of Artificial Sequence: Synthetic polynucleotide
  source 1..138: mol_type = other RNA
gtctggctgtggtggggactggttttagagctagaaatagcaagttaaaataaggctagtccgttatcaacttgaaaaagtggcaccgagtcggtgcggtgttcactgctggcctcggcagtccccaccacttttttt

SEQ ID NO: 976 - RNA, 138 nt, synthetic construct
  misc_feature 1..138: note = Description of Artificial Sequence: Synthetic polynucleotide
  source 1..138: mol_type = other RNA
gtctggctgtggtggggactggttttagagctagaaatagcaagttaaaataaggctagtccgttatcaacttgaaaaagtggcaccgagtcggtgcgggtgttcactgctggcctcagcagtccccaccattttttt

SEQ ID NO: 977 - RNA, 138 nt, synthetic construct
  misc_feature 1..138: note = Description of Artificial Sequence: Synthetic polynucleotide
  source 1..138: mol_type = other RNA
tctggctgtggtggggactggttttagagctagaaatagcaagttaaaataaggctagtccgttatcaacttgaaaaagtggcaccgagtcggtgcggggtgttcactgctggcctccgcagtccccaccacagccag

SEQ ID NO: 978 - RNA, 138 nt, synthetic construct
  misc_feature 1..138: note = Description of Artificial Sequence: Synthetic polynucleotide
  source 1..138: mol_type = other RNA
gtctggctgtggtggggactggttttagagctagaaatagcaagttaaaataaggctagtccgttatcaacttgaaaaagtggcaccgagtcggtgcggggtgttcactgctggcctcagcagtccccaccttttttt

SEQ ID NO: 979 - RNA, 138 nt, synthetic construct
  misc_feature 1..138: note = Description of Artificial Sequence: Synthetic polynucleotide
  source 1..138: mol_type = other RNA
tctggctgtggtggggactggttttagagctagaaatagcaagttaaaataaggctagtccgttatcaacttgaaaaagtggcaccgagtcggtgcgcccaaggggtgttcactgctggcctccgcagtccccaccac

SEQ ID NO: 980 - RNA, 138 nt, synthetic construct
  misc_feature 1..138: note = Description of Artificial Sequence: Synthetic polynucleotide
  source 1..138: mol_type = other RNA
gtctggctgtggtggggactggttttagagctagaaatagcaagttaaaataaggctagtccgttatcaacttgaaaaagtggcaccgagtcggtgcgggtgttcactgctggcctctgcagtccccaccattttttt

SEQ ID NO: 981 - RNA, 138 nt, synthetic construct
  misc_feature 1..138: note = Description of Artificial Sequence: Synthetic polynucleotide
  source 1..138: mol_type = other RNA
gtctggctgtggtggggactggttttagagctagaaatagcaagttaaaataaggctagtccgttatcaacttgaaaaagtggcaccgagtcggtgcaggggtgttcactgctggcctcggcagtccccacttttttt

SEQ ID NO: 982 - RNA, 138 nt, synthetic construct
  misc_feature 1..138: note = Description of Artificial Sequence: Synthetic polynucleotide
  source 1..138: mol_type = other RNA
gtctggctgtggtggggactggttttagagctagaaatagcaagttaaaataaggctagtccgttatcaacttgaaaaagtggcaccgagtcggtgcgggtgttcactgctggcctcggcagtccccaccattttttt

SEQ ID NO: 983 - RNA, 138 nt, synthetic construct
  misc_feature 1..138: note = Description of Artificial Sequence: Synthetic polynucleotide
  source 1..138: mol_type = other RNA
tctggctgtggtggggactggttttagagctagaaatagcaagttaaaataaggctagtccgttatcaacttgaaaaagtggcaccgagtcggtgcggggtgttcactgctggcctctgcagtccccaccacagccag

SEQ ID NO: 984 - RNA, 138 nt, synthetic construct
  misc_feature 1..138: note = Description of Artificial Sequence: Synthetic polynucleotide
  source 1..138: mol_type = other RNA
gtctggctgtggtggggactggttttagagctagaaatagcaagttaaaataaggctagtccgttatcaacttgaaaaagtggcaccgagtcggtgcgggtgttcactgctggcctccgcagtccccaccactttttt

SEQ ID NO: 985 - RNA, 138 nt, synthetic construct
  misc_feature 1..138: note = Description of Artificial Sequence: Synthetic polynucleotide
  source 1..138: mol_type = other RNA
gtctggctgtggtggggactggttttagagctagaaatagcaagttaaaataaggctagtccgttatcaacttgaaaaagtggcaccgagtcggtgcggggtgttcactgctggcctcggcagtccccaccttttttt

SEQ ID NO: 986 - RNA, 138 nt, synthetic construct
  misc_feature 1..138: note = Description of Artificial Sequence: Synthetic polynucleotide
  source 1..138: mol_type = other RNA
gtctggctgtggtggggactggttttagagctagaaatagcaagttaaaataaggctagtccgttatcaacttgaaaaagtggcaccgagtcggtgcaggggtgttcactgctggcctcagcagtccccacttttttt

SEQ ID NO: 987 - RNA, 138 nt, synthetic construct
  misc_feature 1..138: note = Description of Artificial Sequence: Synthetic polynucleotide
  source 1..138: mol_type = other RNA
tctggctgtggtggggactggttttagagctagaaatagcaagttaaaataaggctagtccgttatcaacttgaaaaagtggcaccgagtcggtgcgcccaaggggtgttcactgctggcctctgcagtccccaccac

SEQ ID NO: 988 - RNA, 138 nt, synthetic construct
  misc_feature 1..138: note = Description of Artificial Sequence: Synthetic polynucleotide
  source 1..138: mol_type = other RNA
gtctggctgtggtggggactggttttagagctagaaatagcaagttaaaataaggctagtccgttatcaacttgaaaaagtggcaccgagtcggtgcaggggtgttcactgctggcctctgcagtccccacctttttt

SEQ ID NO: 989 - RNA, 138 nt, synthetic construct
  misc_feature 1..138: note = Description of Artificial Sequence: Synthetic polynucleotide
  source 1..138: mol_type = other RNA
tctggctgtggtggggactggttttagagctagaaatagcaagttaaaataaggctagtccgttatcaacttgaaaaagtggcaccgagtcggtgcaaggggtgttcactgctggcctccgcagtccccaccacagcc

SEQ ID NO: 990 - RNA, 138 nt, synthetic construct
  misc_feature 1..138: note = Description of Artificial Sequence: Synthetic polynucleotide
  source 1..138: mol_type = other RNA
gtctggctgtggtggggactggttttagagctagaaatagcaagttaaaataaggctagtccgttatcaacttgaaaaagtggcaccgagtcggtgcggggtgttcactgctggcctccgcagtccccaccttttttt

SEQ ID NO: 991 - RNA, 138 nt, synthetic construct
  misc_feature 1..138: note = Description of Artificial Sequence: Synthetic polynucleotide
  source 1..138: mol_type = other RNA
gtctggctgtggtggggactggttttagagctagaaatagcaagttaaaataaggctagtccgttatcaacttgaaaaagtggcaccgagtcggtgcgggtgttcactgctggcctccgcagtccccaccattttttt

SEQ ID NO: 992 - RNA, 138 nt, synthetic construct
  misc_feature 1..138: note = Description of Artificial Sequence: Synthetic polynucleotide
  source 1..138: mol_type = other RNA
tctggctgtggtggggactggttttagagctagaaatagcaagttaaaataaggctagtccgttatcaacttgaaaaagtggcaccgagtcggtgcacgcccaaggggtgttcactgctggcctccgcagtccccacc

SEQ ID NO: 993 - RNA, 138 nt, synthetic construct
  misc_feature 1..138: note = Description of Artificial Sequence: Synthetic polynucleotide
  source 1..138: mol_type = other RNA
gtctggctgtggtggggactggttttagagctagaaatagcaagttaaaataaggctagtccgttatcaacttgaaaaagtggcaccgagtcggtgcaggggtgttcactgctggcctctgcagtccccacttttttt

SEQ ID NO: 994 - RNA, 138 nt, synthetic construct
  misc_feature 1..138: note = Description of Artificial Sequence: Synthetic polynucleotide
  source 1..138: mol_type = other RNA
gtctggctgtggtggggactggttttagagctagaaatagcaagttaaaataaggctagtccgttatcaacttgaaaaagtggcaccgagtcggtgcaggggtgttcactgctggcctccgcagtccccacctttttt

SEQ ID NO: 995 - RNA, 138 nt, synthetic construct
  misc_feature 1..138: note = Description of Artificial Sequence: Synthetic polynucleotide
  source 1..138: mol_type = other RNA
gtctggctgtggtggggactggttttagagctagaaatagcaagttaaaataaggctagtccgttatcaacttgaaaaagtggcaccgagtcggtgcgggtgttcactgctggcctcagcagtccccaccactttttt

SEQ ID NO: 996 - RNA, 138 nt, synthetic construct
  misc_feature 1..138: note = Description of Artificial Sequence: Synthetic polynucleotide
  source 1..138: mol_type = other RNA
gtctggctgtggtggggactggttttagagctagaaatagcaagttaaaataaggctagtccgttatcaacttgaaaaagtggcaccgagtcggtgcaggggtgttcactgctggcctccgcagtccccacttttttt

SEQ ID NO: 997 - RNA, 138 nt, synthetic construct
  misc_feature 1..138: note = Description of Artificial Sequence: Synthetic polynucleotide
  source 1..138: mol_type = other RNA
tctggctgtggtggggactggttttagagctagaaatagcaagttaaaataaggctagtccgttatcaacttgaaaaagtggcaccgagtcggtgcaaggggtgttcactgctggcctcggcagtccccaccacagcc

SEQ ID NO: 998 - RNA, 138 nt, synthetic construct
  misc_feature 1..138: note = Description of Artificial Sequence: Synthetic polynucleotide
  source 1..138: mol_type = other RNA
gtctggctgtggtggggactggttttagagctagaaatagcaagttaaaataaggctagtccgttatcaacttgaaaaagtggcaccgagtcggtgcgggtgttcactgctggcctcggcagtccccaccactttttt

SEQ ID NO: 999 - RNA, 138 nt, synthetic construct
  misc_feature 1..138: note = Description of Artificial Sequence: Synthetic polynucleotide
  source 1..138: mol_type = other RNA
gtctggctgtggtggggactggttttagagctagaaatagcaagttaaaataaggctagtccgttatcaacttgaaaaagtggcaccgagtcggtgcggtgttcactgctggcctcagcagtccccaccacttttttt

SEQ ID NO: 1000 - RNA, 138 nt, synthetic construct
  misc_feature 1..138: note = Description of Artificial Sequence: Synthetic polynucleotide
  source 1..138: mol_type = other RNA
tctggctgtggtggggactggttttagagctagaaatagcaagttaaaataaggctagtccgttatcaacttgaaaaagtggcaccgagtcggtgcgcccaaggggtgttcactgctggcctcggcagtccccaccac

SEQ ID NO: 1001 - RNA, 139 nt, synthetic construct
  misc_feature 1..139: note = Description of Artificial Sequence: Synthetic polynucleotide
  source 1..139: mol_type = other RNA
gtctggctgtggtggggactggttttagagctagaaatagcaagttaaaataaggctagtccgttatcaacttgaaaaagtggcaccgagtcggtgcggtgttcactgctggcctcagcagtccccaccacagtttttt

SEQ ID NO: 1002 - RNA, 139 nt, synthetic construct
  misc_feature 1..139: note = Description of Artificial Sequence: Synthetic polynucleotide
  source 1..139: mol_type = other RNA
gtctggctgtggtggggactggttttagagctagaaatagcaagttaaaataaggctagtccgttatcaacttgaaaaagtggcaccgagtcggtgcggggtgttcactgctggcctcggcagtccccaccattttttt

SEQ ID NO: 1003 - RNA, 139 nt, synthetic construct
  misc_feature 1..139: note = Description of Artificial Sequence: Synthetic polynucleotide
  source 1..139: mol_type = other RNA
gtctggctgtggtggggactggttttagagctagaaatagcaagttaaaataaggctagtccgttatcaacttgaaaaagtggcaccgagtcggtgcggtgttcactgctggcctcggcagtccccaccacagtttttt

SEQ ID NO: 1004 - RNA, 139 nt, synthetic construct
  misc_feature 1..139: note = Description of Artificial Sequence: Synthetic polynucleotide
  source 1..139: mol_type = other RNA
gtctggctgtggtggggactggttttagagctagaaatagcaagttaaaataaggctagtccgttatcaacttgaaaaagtggcaccgagtcggtgcgggtgttcactgctggcctcagcagtccccaccacttttttt

SEQ ID NO: 1005 - RNA, 139 nt, synthetic construct
  misc_feature 1..139: note = Description of Artificial Sequence: Synthetic polynucleotide
  source 1..139: mol_type = other RNA
gtctggctgtggtggggactggttttagagctagaaatagcaagttaaaataaggctagtccgttatcaacttgaaaaagtggcaccgagtcggtgcggtgttcactgctggcctccgcagtccccaccacagtttttt

SEQ ID NO: 1006 - RNA, 139 nt, synthetic construct
  misc_feature 1..139: note = Description of Artificial Sequence: Synthetic polynucleotide
  source 1..139: mol_type = other RNA
gtctggctgtggtggggactggttttagagctagaaatagcaagttaaaataaggctagtccgttatcaacttgaaaaagtggcaccgagtcggtgcggggtgttcactgctggcctcggcagtccccaccactttttt

SEQ ID NO: 1007 - RNA, 139 nt, synthetic construct
  misc_feature 1..139: note = Description of Artificial Sequence: Synthetic polynucleotide
  source 1..139: mol_type = other RNA
gtctggctgtggtggggactggttttagagctagaaatagcaagttaaaataaggctagtccgttatcaacttgaaaaagtggcaccgagtcggtgcggtgttcactgctggcctctgcagtccccaccacattttttt

SEQ ID NO: 1008 - RNA, 139 nt, synthetic construct
  misc_feature 1..139: note = Description of Artificial Sequence: Synthetic polynucleotide
  source 1..139: mol_type = other RNA
gtctggctgtggtggggactggttttagagctagaaatagcaagttaaaataaggctagtccgttatcaacttgaaaaagtggcaccgagtcggtgcgggtgttcactgctggcctctgcagtccccaccacttttttt

SEQ ID NO: 1009 - RNA, 139 nt, synthetic construct
  misc_feature 1..139: note = Description of Artificial Sequence: Synthetic polynucleotide
  source 1..139: mol_type = other RNA
gtctggctgtggtggggactggttttagagctagaaatagcaagttaaaataaggctagtccgttatcaacttgaaaaagtggcaccgagtcggtgcggtgttcactgctggcctccgcagtccccaccacattttttt

SEQ ID NO: 1010 - RNA, 139 nt, synthetic construct
  misc_feature 1..139: note = Description of Artificial Sequence: Synthetic polynucleotide
  source 1..139: mol_type = other RNA
gtctggctgtggtggggactggttttagagctagaaatagcaagttaaaataaggctagtccgttatcaacttgaaaaagtggcaccgagtcggtgcaaggggtgttcactgctggcctctgcagtccccacctttttt

SEQ ID NO: 1011 - RNA, 139 nt, synthetic construct
  misc_feature 1..139: note = Description of Artificial Sequence: Synthetic polynucleotide
  source 1..139: mol_type = other RNA
gtctggctgtggtggggactggttttagagctagaaatagcaagttaaaataaggctagtccgttatcaacttgaaaaagtggcaccgagtcggtgcaaggggtgttcactgctggcctcggcagtccccacttttttt

SEQ ID NO: 1012 - RNA, 139 nt, synthetic construct
  misc_feature 1..139: note = Description of Artificial Sequence: Synthetic polynucleotide
  source 1..139: mol_type = other RNA
gtctggctgtggtggggactggttttagagctagaaatagcaagttaaaataaggctagtccgttatcaacttgaaaaagtggcaccgagtcggtgcggggtgttcactgctggcctctgcagtccccaccattttttt

SEQ ID NO: 1013 - RNA, 139 nt, synthetic construct
  misc_feature 1..139: note = Description of Artificial Sequence: Synthetic polynucleotide
  source 1..139: mol_type = other RNA
gtctggctgtggtggggactggttttagagctagaaatagcaagttaaaataaggctagtccgttatcaacttgaaaaagtggcaccgagtcggtgcaggggtgttcactgctggcctcagcagtccccaccttttttt

SEQ ID NO: 1014 - RNA, 139 nt, synthetic construct
  misc_feature 1..139: note = Description of Artificial Sequence: Synthetic polynucleotide
  source 1..139: mol_type = other RNA
gtctggctgtggtggggactggttttagagctagaaatagcaagttaaaataaggctagtccgttatcaacttgaaaaagtggcaccgagtcggtgcaggggtgttcactgctggcctcggcagtccccaccttttttt

SEQ ID NO: 1015 - RNA, 139 nt, synthetic construct
  misc_feature 1..139: note = Description of Artificial Sequence: Synthetic polynucleotide
  source 1..139: mol_type = other RNA
gtctggctgtggtggggactggttttagagctagaaatagcaagttaaaataaggctagtccgttatcaacttgaaaaagtggcaccgagtcggtgcaggggtgttcactgctggcctccgcagtccccaccttttttt

SEQ ID NO: 1016 - RNA, 139 nt, synthetic construct
  misc_feature 1..139: note = Description of Artificial Sequence: Synthetic polynucleotide
  source 1..139: mol_type = other RNA
gtctggctgtggtggggactggttttagagctagaaatagcaagttaaaataaggctagtccgttatcaacttgaaaaagtggcaccgagtcggtgcaaggggtgttcactgctggcctcagcagtccccacttttttt

SEQ ID NO: 1017 - RNA, 139 nt, synthetic construct
  misc_feature 1..139: note = Description of Artificial Sequence: Synthetic polynucleotide
  source 1..139: mol_type = other RNA
gtctggctgtggtggggactggttttagagctagaaatagcaagttaaaataaggctagtccgttatcaacttgaaaaagtggcaccgagtcggtgcggggtgttcactgctggcctccgcagtccccaccactttttt

SEQ ID NO: 1018 - RNA, 139 nt, synthetic construct
  misc_feature 1..139: note = Description of Artificial Sequence: Synthetic polynucleotide
  source 1..139: mol_type = other RNA
tctggctgtggtggggactggttttagagctagaaatagcaagttaaaataaggctagtccgttatcaacttgaaaaagtggcaccgagtcggtgcgcccaaggggtgttcactgctggcctctgcagtccccaccaca

SEQ ID NO: 1019 - RNA, 139 nt, synthetic construct
  misc_feature 1..139: note = Description of Artificial Sequence: Synthetic polynucleotide
  source 1..139: mol_type = other RNA
tctggctgtggtggggactggttttagagctagaaatagcaagttaaaataaggctagtccgttatcaacttgaaaaagtggcaccgagtcggtgcacgcccaaggggtgttcactgctggcctcggcagtccccacca

SEQ ID NO: 1020 - RNA, 139 nt, synthetic construct
  misc_feature 1..139: note = Description of Artificial Sequence: Synthetic polynucleotide
  source 1..139: mol_type = other RNA
tctggctgtggtggggactggttttagagctagaaatagcaagttaaaataaggctagtccgttatcaacttgaaaaagtggcaccgagtcggtgcaggggtgttcactgctggcctctgcagtccccaccacagccag

SEQ ID NO: 1021 - RNA, 139 nt, synthetic construct
  misc_feature 1..139: note = Description of Artificial Sequence: Synthetic polynucleotide
  source 1..139: mol_type = other RNA
tctggctgtggtggggactggttttagagctagaaatagcaagttaaaataaggctagtccgttatcaacttgaaaaagtggcaccgagtcggtgcgcccaaggggtgttcactgctggcctcggcagtccccaccaca

SEQ ID NO: 1022 - RNA, 139 nt, synthetic construct
  misc_feature 1..139: note = Description of Artificial Sequence: Synthetic polynucleotide
  source 1..139: mol_type = other RNA
tctggctgtggtggggactggttttagagctagaaatagcaagttaaaataaggctagtccgttatcaacttgaaaaagtggcaccgagtcggtgcacgcccaaggggtgttcactgctggcctccgcagtccccacca

SEQ ID NO: 1023 - RNA, 139 nt, synthetic construct
  misc_feature 1..139: note = Description of Artificial Sequence: Synthetic polynucleotide
  source 1..139: mol_type = other RNA
tctggctgtggtggggactggttttagagctagaaatagcaagttaaaataaggctagtccgttatcaacttgaaaaagtggcaccgagtcggtgcgcccaaggggtgttcactgctggcctcagcagtccccaccaca

SEQ ID NO: 1024 - RNA, 139 nt, synthetic construct
  misc_feature 1..139: note = Description of Artificial Sequence: Synthetic polynucleotide
  source 1..139: mol_type = other RNA
tctggctgtggtggggactggttttagagctagaaatagcaagttaaaataaggctagtccgttatcaacttgaaaaagtggcaccgagtcggtgcaggggtgttcactgctggcctcagcagtccccaccacagccag

SEQ ID NO: 1025 - RNA, 139 nt, synthetic construct
  misc_feature 1..139: note = Description of Artificial Sequence: Synthetic polynucleotide
  source 1..139: mol_type = other RNA
tctggctgtggtggggactggttttagagctagaaatagcaagttaaaataaggctagtccgttatcaacttgaaaaagtggcaccgagtcggtgcacgcccaaggggtgttcactgctggcctctgcagtccccacca

SEQ ID NO: 1026 - RNA, 139 nt, synthetic construct
  misc_feature 1..139: note = Description of Artificial Sequence: Synthetic polynucleotide
  source 1..139: mol_type = other RNA
gtctggctgtggtggggactggttttagagctagaaatagcaagttaaaataaggctagtccgttatcaacttgaaaaagtggcaccgagtcggtgcgggtgttcactgctggcctcggcagtccccaccacttttttt

SEQ ID NO: 1027 - RNA, 139 nt, synthetic construct
  misc_feature 1..139: note = Description of Artificial Sequence: Synthetic polynucleotide
  source 1..139: mol_type = other RNA
gtctggctgtggtggggactggttttagagctagaaatagcaagttaaaataaggctagtccgttatcaacttgaaaaagtggcaccgagtcggtgcgggtgttcactgctggcctccgcagtccccaccacttttttt

SEQ ID NO: 1028 - RNA, 139 nt, synthetic construct
  misc_feature 1..139: note = Description of Artificial Sequence: Synthetic polynucleotide
  source 1..139: mol_type = other RNA
gtctggctgtggtggggactggttttagagctagaaatagcaagttaaaataaggctagtccgttatcaacttgaaaaagtggcaccgagtcggtgcggtgttcactgctggcctcggcagtccccaccacattttttt

SEQ ID NO: 1029 - RNA, 139 nt, synthetic construct
  misc_feature 1..139: note = Description of Artificial Sequence: Synthetic polynucleotide
  source 1..139: mol_type = other RNA
gtctggctgtggtggggactggttttagagctagaaatagcaagttaaaataaggctagtccgttatcaacttgaaaaagtggcaccgagtcggtgcaaggggtgttcactgctggcctcagcagtccccacctttttt

SEQ ID NO: 1030 - RNA, 139 nt, synthetic construct
  misc_feature 1..139: note = Description of Artificial Sequence: Synthetic polynucleotide
  source 1..139: mol_type = other RNA
gtctggctgtggtggggactggttttagagctagaaatagcaagttaaaataaggctagtccgttatcaacttgaaaaagtggcaccgagtcggtgcggggtgttcactgctggcctcagcagtccccaccattttttt

SEQ ID NO: 1031 - RNA, 139 nt, synthetic construct
  misc_feature 1..139: note = Description of Artificial Sequence: Synthetic polynucleotide
  source 1..139: mol_type = other RNA
gtctggctgtggtggggactggttttagagctagaaatagcaagttaaaataaggctagtccgttatcaacttgaaaaagtggcaccgagtcggtgcggggtgttcactgctggcctccgcagtccccaccattttttt

SEQ ID NO: 1032 - RNA, 139 nt, synthetic construct
  misc_feature 1..139: note = Description of Artificial Sequence: Synthetic polynucleotide
  source 1..139: mol_type = other RNA
gtctggctgtggtggggactggttttagagctagaaatagcaagttaaaataaggctagtccgttatcaacttgaaaaagtggcaccgagtcggtgcggggtgttcactgctggcctctgcagtccccaccactttttt

SEQ ID NO: 1033 - RNA, 139 nt, synthetic construct
  misc_feature 1..139: note = Description of Artificial Sequence: Synthetic polynucleotide
  source 1..139: mol_type = other RNA
gtctggctgtggtggggactggttttagagctagaaatagcaagttaaaataaggctagtccgttatcaacttgaaaaagtggcaccgagtcggtgcaggggtgttcactgctggcctctgcagtccccaccttttttt

SEQ ID NO: 1034 - RNA, 139 nt, synthetic construct
  misc_feature 1..139: note = Description of Artificial Sequence: Synthetic polynucleotide
  source 1..139: mol_type = other RNA
gtctggctgtggtggggactggttttagagctagaaatagcaagttaaaataaggctagtccgttatcaacttgaaaaagtggcaccgagtcggtgcggtgttcactgctggcctctgcagtccccaccacagtttttt

SEQ ID NO: 1035 - RNA, 139 nt, synthetic construct
  misc_feature 1..139: note = Description of Artificial Sequence: Synthetic polynucleotide
  source 1..139: mol_type = other RNA
gtctggctgtggtggggactggttttagagctagaaatagcaagttaaaataaggctagtccgttatcaacttgaaaaagtggcaccgagtcggtgcaaggggtgttcactgctggcctccgcagtccccacttttttt

SEQ ID NO: 1036 - RNA, 139 nt, synthetic construct
  misc_feature 1..139: note = Description of Artificial Sequence: Synthetic polynucleotide
  source 1..139: mol_type = other RNA
gtctggctgtggtggggactggttttagagctagaaatagcaagttaaaataaggctagtccgttatcaacttgaaaaagtggcaccgagtcggtgcggggtgttcactgctggcctcagcagtccccaccactttttt

SEQ ID NO: 1037 - RNA, 139 nt, synthetic construct
  misc_feature 1..139: note = Description of Artificial Sequence: Synthetic polynucleotide
  source 1..139: mol_type = other RNA
tctggctgtggtggggactggttttagagctagaaatagcaagttaaaataaggctagtccgttatcaacttgaaaaagtggcaccgagtcggtgcgcccaaggggtgttcactgctggcctccgcagtccccaccaca

SEQ ID NO: 1038 - RNA, 139 nt, synthetic construct
  misc_feature 1..139: note = Description of Artificial Sequence: Synthetic polynucleotide
  source 1..139: mol_type = other RNA
gtctggctgtggtggggactggttttagagctagaaatagcaagttaaaataaggctagtccgttatcaacttgaaaaagtggcaccgagtcggtgcggtgttcactgctggcctcagcagtccccaccacattttttt

SEQ ID NO: 1039 - RNA, 139 nt, synthetic construct
  misc_feature 1..139: note = Description of Artificial Sequence: Synthetic polynucleotide
  source 1..139: mol_type = other RNA
gtctggctgtggtggggactggttttagagctagaaatagcaagttaaaataaggctagtccgttatcaacttgaaaaagtggcaccgagtcggtgcaaggggtgttcactgctggcctcggcagtccccacctttttt

SEQ ID NO: 1040 - RNA, 139 nt, synthetic construct
  misc_feature 1..139: note = Description of Artificial Sequence: Synthetic polynucleotide
  source 1..139: mol_type = other RNA
gtctggctgtggtggggactggttttagagctagaaatagcaagttaaaataaggctagtccgttatcaacttgaaaaagtggcaccgagtcggtgcaaggggtgttcactgctggcctctgcagtccccacttttttt

SEQ ID NO: 1041 - RNA, 139 nt, synthetic construct
  misc_feature 1..139: note = Description of Artificial Sequence: Synthetic polynucleotide
  source 1..139: mol_type = other RNA
tctggctgtggtggggactggttttagagctagaaatagcaagttaaaataaggctagtccgttatcaacttgaaaaagtggcaccgagtcggtgcaggggtgttcactgctggcctccgcagtccccaccacagccag

SEQ ID NO: 1042 - RNA, 139 nt, synthetic construct
  misc_feature 1..139: note = Description of Artificial Sequence: Synthetic polynucleotide
  source 1..139: mol_type = other RNA
gtctggctgtggtggggactggttttagagctagaaatagcaagttaaaataaggctagtccgttatcaacttgaaaaagtggcaccgagtcggtgcaaggggtgttcactgctggcctccgcagtccccacctttttt

SEQ ID NO: 1043 - RNA, 139 nt, synthetic construct
  misc_feature 1..139: note = Description of Artificial Sequence: Synthetic polynucleotide
  source 1..139: mol_type = other RNA
tctggctgtggtggggactggttttagagctagaaatagcaagttaaaataaggctagtccgttatcaacttgaaaaagtggcaccgagtcggtgcaggggtgttcactgctggcctcggcagtccccaccacagccag

SEQ ID NO: 1044 - RNA, 139 nt, synthetic construct
  misc_feature 1..139: note = Description of Artificial Sequence: Synthetic polynucleotide
  source 1..139: mol_type = other RNA
tctggctgtggtggggactggttttagagctagaaatagcaagttaaaataaggctagtccgttatcaacttgaaaaagtggcaccgagtcggtgcacgcccaaggggtgttcactgctggcctcagcagtccccacca

SEQ ID NO: 1045 - RNA, 140 nt, synthetic construct
  misc_feature 1..140: note = Description of Artificial Sequence: Synthetic polynucleotide
  source 1..140: mol_type = other RNA
tctggctgtggtggggactggttttagagctagaaatagcaagttaaaataaggctagtccgttatcaacttgaaaaagtggcaccgagtcggtgcacgcccaaggggtgttcactgctggcctccgcagtccccaccac

SEQ ID NO: 1046 - RNA, 140 nt, synthetic construct
  misc_feature 1..140: note = Description of Artificial Sequence: Synthetic polynucleotide
  source 1..140: mol_type = other RNA
tctggctgtggtggggactggttttagagctagaaatagcaagttaaaataaggctagtccgttatcaacttgaaaaagtggcaccgagtcggtgcgcccaaggggtgttcactgctggcctccgcagtccccaccacag

SEQ ID NO: 1047 - RNA, 140 nt, synthetic construct
  misc_feature 1..140: note = Description of Artificial Sequence: Synthetic polynucleotide
  source 1..140: mol_type = other RNA
gtctggctgtggtggggactggttttagagctagaaatagcaagttaaaataaggctagtccgttatcaacttgaaaaagtggcaccgagtcggtgcaggggtgttcactgctggcctctgcagtccccaccactttttt

SEQ ID NO: 1048 - RNA, 140 nt, synthetic construct
  misc_feature 1..140: note = Description of Artificial Sequence: Synthetic polynucleotide
  source 1..140: mol_type = other RNA
gtctggctgtggtggggactggttttagagctagaaatagcaagttaaaataaggctagtccgttatcaacttgaaaaagtggcaccgagtcggtgcggtgttcactgctggcctctgcagtccccaccacagttttttt

SEQ ID NO: 1049 - RNA, 140 nt, synthetic construct
  misc_feature 1..140: note = Description of Artificial Sequence: Synthetic polynucleotide
  source 1..140: mol_type = other RNA
gtctggctgtggtggggactggttttagagctagaaatagcaagttaaaataaggctagtccgttatcaacttgaaaaagtggcaccgagtcggtgcaaggggtgttcactgctggcctcagcagtccccaccttttttt

SEQ ID NO: 1050 - RNA, 140 nt, synthetic construct
  misc_feature 1..140: note = Description of Artificial Sequence: Synthetic polynucleotide
  source 1..140: mol_type = other RNA
tctggctgtggtggggactggttttagagctagaaatagcaagttaaaataaggctagtccgttatcaacttgaaaaagtggcaccgagtcggtgcgccacgcccaaggggtgttcactgctggcctcggcagtccccac

SEQ ID NO: 1051 - RNA, 140 nt, synthetic construct
  misc_feature 1..140: note = Description of Artificial Sequence: Synthetic polynucleotide
  source 1..140: mol_type = other RNA
gtctggctgtggtggggactggttttagagctagaaatagcaagttaaaataaggctagtccgttatcaacttgaaaaagtggcaccgagtcggtgcggtgttcactgctggcctccgcagtccccaccacagttttttt

SEQ ID NO: 1052 - RNA, 140 nt, synthetic construct
  misc_feature 1..140: note = Description of Artificial Sequence: Synthetic polynucleotide
  source 1..140: mol_type = other RNA
gtctggctgtggtggggactggttttagagctagaaatagcaagttaaaataaggctagtccgttatcaacttgaaaaagtggcaccgagtcggtgcggggtgttcactgctggcctccgcagtccccaccacttttttt

SEQ ID NO: 1053 - RNA, 140 nt, synthetic construct
  misc_feature 1..140: note = Description of Artificial Sequence: Synthetic polynucleotide
  source 1..140: mol_type = other RNA
gtctggctgtggtggggactggttttagagctagaaatagcaagttaaaataaggctagtccgttatcaacttgaaaaagtggcaccgagtcggtgcgggtgttcactgctggcctctgcagtccccaccacattttttt

SEQ ID NO: 1054 - RNA, 140 nt, synthetic construct
  misc_feature 1..140: note = Description of Artificial Sequence: Synthetic polynucleotide
  source 1..140: mol_type = other RNA
gtctggctgtggtggggactggttttagagctagaaatagcaagttaaaataaggctagtccgttatcaacttgaaaaagtggcaccgagtcggtgcggtgttcactgctggcctcagcagtccccaccacagttttttt

SEQ ID NO: 1055 - RNA, 140 nt, synthetic construct
  misc_feature 1..140: note = Description of Artificial Sequence: Synthetic polynucleotide
  source 1..140: mol_type = other RNA
gtctggctgtggtggggactggttttagagctagaaatagcaagttaaaataaggctagtccgttatcaacttgaaaaagtggcaccgagtcggtgcggggtgttcactgctggcctcggcagtccccaccacttttttt

SEQ ID NO: 1056 - RNA, 140 nt, synthetic construct
  misc_feature 1..140: note = Description of Artificial Sequence: Synthetic polynucleotide
  source 1..140: mol_type = other RNA
gtctggctgtggtggggactggttttagagctagaaatagcaagttaaaataaggctagtccgttatcaacttgaaaaagtggcaccgagtcggtgcaaggggtgttcactgctggcctccgcagtccccaccttttttt

SEQ ID NO: 1057 - RNA, 140 nt, synthetic construct
  misc_feature 1..140: note = Description of Artificial Sequence: Synthetic polynucleotide
  source 1..140: mol_type = other RNA
tctggctgtggtggggactggttttagagctagaaatagcaagttaaaataaggctagtccgttatcaacttgaaaaagtggcaccgagtcggtgcaaggggtgttcactgctggcctctgcagtccccaccacagccag

SEQ ID NO: 1058 - RNA, 140 nt, synthetic construct
  misc_feature 1..140: note = Description of Artificial Sequence: Synthetic polynucleotide
  source 1..140: mol_type = other RNA
gtctggctgtggtggggactggttttagagctagaaatagcaagttaaaataaggctagtccgttatcaacttgaaaaagtggcaccgagtcggtgcgggtgttcactgctggcctccgcagtccccaccacattttttt

SEQ ID NO: 1059 - RNA, 140 nt, synthetic construct
  misc_feature 1..140: note = Description of Artificial Sequence: Synthetic polynucleotide
  source 1..140: mol_type = other RNA
gtctggctgtggtggggactggttttagagctagaaatagcaagttaaaataaggctagtccgttatcaacttgaaaaagtggcaccgagtcggtgcaggggtgttcactgctggcctcggcagtccccaccactttttt

SEQ ID NO: 1060 - RNA, 140 nt, synthetic construct
  misc_feature 1..140: note = Description of Artificial Sequence: Synthetic polynucleotide
  source 1..140: mol_type = other RNA
gtctggctgtggtggggactggttttagagctagaaatagcaagttaaaataaggctagtccgttatcaacttgaaaaagtggcaccgagtcggtgcgggtgttcactgctggcctcagcagtccccaccacagtttttt

SEQ ID NO: 1061 - RNA, 140 nt, synthetic construct
  misc_feature 1..140: note = Description of Artificial Sequence: Synthetic polynucleotide
  source 1..140: mol_type = other RNA
gtctggctgtggtggggactggttttagagctagaaatagcaagttaaaataaggctagtccgttatcaacttgaaaaagtggcaccgagtcggtgcgggtgttcactgctggcctccgcagtccccaccacagtttttt

SEQ ID NO: 1062 - RNA, 140 nt, synthetic construct
  misc_feature 1..140: note = Description of Artificial Sequence: Synthetic polynucleotide
  source 1..140: mol_type = other RNA
gtctggctgtggtggggactggttttagagctagaaatagcaagttaaaataaggctagtccgttatcaacttgaaaaagtggcaccgagtcggtgcaggggtgttcactgctggcctctgcagtccccaccattttttt

SEQ ID NO: 1063 - RNA, 140 nt, synthetic construct
  misc_feature 1..140: note = Description of Artificial Sequence: Synthetic polynucleotide
  source 1..140: mol_type = other RNA
gtctggctgtggtggggactggttttagagctagaaatagcaagttaaaataaggctagtccgttatcaacttgaaaaagtggcaccgagtcggtgcggtgttcactgctggcctcggcagtccccaccacagttttttt

SEQ ID NO: 1064 - RNA, 140 nt, synthetic construct
  misc_feature 1..140: note = Description of Artificial Sequence: Synthetic polynucleotide
  source 1..140: mol_type = other RNA
gtctggctgtggtggggactggttttagagctagaaatagcaagttaaaataaggctagtccgttatcaacttgaaaaagtggcaccgagtcggtgcggggtgttcactgctggcctcagcagtccccaccacttttttt

SEQ ID NO: 1065 - RNA, 140 nt, synthetic construct
  misc_feature 1..140: note = Description of Artificial Sequence: Synthetic polynucleotide
  source 1..140: mol_type = other RNA
gtctggctgtggtggggactggttttagagctagaaatagcaagttaaaataaggctagtccgttatcaacttgaaaaagtggcaccgagtcggtgcaggggtgttcactgctggcctcagcagtccccaccactttttt

SEQ ID NO: 1066 - RNA, 140 nt, synthetic construct
  misc_feature 1..140: note = Description of Artificial Sequence: Synthetic polynucleotide
  source 1..140: mol_type = other RNA
gtctggctgtggtggggactggttttagagctagaaatagcaagttaaaataaggctagtccgttatcaacttgaaaaagtggcaccgagtcggtgcaaggggtgttcactgctggcctcggcagtccccaccttttttt

SEQ ID NO: 1067 - RNA, 140 nt, synthetic construct
  misc_feature 1..140: note = Description of Artificial Sequence: Synthetic polynucleotide
  source 1..140: mol_type = other RNA
gtctggctgtggtggggactggttttagagctagaaatagcaagttaaaataaggctagtccgttatcaacttgaaaaagtggcaccgagtcggtgcaggggtgttcactgctggcctccgcagtccccaccattttttt

SEQ ID NO: 1068 - RNA, 140 nt, synthetic construct
  misc_feature 1..140: note = Description of Artificial Sequence: Synthetic polynucleotide
  source 1..140: mol_type = other RNA
tctggctgtggtggggactggttttagagctagaaatagcaagttaaaataaggctagtccgttatcaacttgaaaaagtggcaccgagtcggtgcaaggggtgttcactgctggcctcggcagtccccaccacagccag

SEQ ID NO: 1069 - RNA, 140 nt, synthetic construct
  misc_feature 1..140: note = Description of Artificial Sequence: Synthetic polynucleotide
  source 1..140: mol_type = other RNA
gtctggctgtggtggggactggttttagagctagaaatagcaagttaaaataaggctagtccgttatcaacttgaaaaagtggcaccgagtcggtgcgggtgttcactgctggcctcggcagtccccaccacattttttt

SEQ ID NO: 1070 - RNA, 140 nt, synthetic construct
  misc_feature 1..140: note = Description of Artificial Sequence: Synthetic polynucleotide
  source 1..140: mol_type = other RNA
gtctggctgtggtggggactggttttagagctagaaatagcaagttaaaataaggctagtccgttatcaacttgaaaaagtggcaccgagtcggtgcggggtgttcactgctggcctctgcagtccccaccacttttttt

SEQ ID NO: 1071 - RNA, 140 nt, synthetic construct
  misc_feature 1..140: note = Description of Artificial Sequence: Synthetic polynucleotide
  source 1..140: mol_type = other RNA
gtctggctgtggtggggactggttttagagctagaaatagcaagttaaaataaggctagtccgttatcaacttgaaaaagtggcaccgagtcggtgcaggggtgttcactgctggcctcagcagtccccaccattttttt

SEQ ID NO: 1072 - RNA, 140 nt, synthetic construct
  misc_feature 1..140: note = Description of Artificial Sequence: Synthetic polynucleotide
  source 1..140: mol_type = other RNA
gtctggctgtggtggggactggttttagagctagaaatagcaagttaaaataaggctagtccgttatcaacttgaaaaagtggcaccgagtcggtgcgggtgttcactgctggcctcagcagtccccaccacattttttt

SEQ ID NO: 1073 - RNA, 140 nt, synthetic construct
  misc_feature 1..140: note = Description of Artificial Sequence: Synthetic polynucleotide
  source 1..140: mol_type = other RNA
gtctggctgtggtggggactggttttagagctagaaatagcaagttaaaataaggctagtccgttatcaacttgaaaaagtggcaccgagtcggtgcaggggtgttcactgctggcctcggcagtccccaccattttttt

SEQ ID NO: 1074 - RNA, 140 nt, synthetic construct
  misc_feature 1..140: note = Description of Artificial Sequence: Synthetic polynucleotide
  source 1..140: mol_type = other RNA
tctggctgtggtggggactggttttagagctagaaatagcaagttaaaataaggctagtccgttatcaacttgaaaaagtggcaccgagtcggtgcaaggggtgttcactgctggcctccgcagtccccaccacagccag

SEQ ID NO: 1075 - RNA, 140 nt, synthetic construct
  misc_feature 1..140: note = Description of Artificial Sequence: Synthetic polynucleotide
  source 1..140: mol_type = other RNA
gtctggctgtggtggggactggttttagagctagaaatagcaagttaaaataaggctagtccgttatcaacttgaaaaagtggcaccgagtcggtgcaggggtgttcactgctggcctccgcagtccccaccactttttt

SEQ ID NO: 1076 - RNA, 140 nt, synthetic construct
  misc_feature 1..140: note = Description of Artificial Sequence: Synthetic polynucleotide
  source 1..140: mol_type = other RNA
tctggctgtggtggggactggttttagagctagaaatagcaagttaaaataaggctagtccgttatcaacttgaaaaagtggcaccgagtcggtgcgccacgcccaaggggtgttcactgctggcctccgcagtccccac

SEQ ID NO: 1077 - RNA, 140 nt, synthetic construct
  misc_feature 1..140: note = Description of Artificial Sequence: Synthetic polynucleotide
  source 1..140: mol_type = other RNA
tctggctgtggtggggactggttttagagctagaaatagcaagttaaaataaggctagtccgttatcaacttgaaaaagtggcaccgagtcggtgcacgcccaaggggtgttcactgctggcctctgcagtccccaccac

SEQ ID NO: 1078 - RNA, 140 nt, synthetic construct
  misc_feature 1..140: note = Description of Artificial Sequence: Synthetic polynucleotide
  source 1..140: mol_type = other RNA
tctggctgtggtggggactggttttagagctagaaatagcaagttaaaataaggctagtccgttatcaacttgaaaaagtggcaccgagtcggtgcgccacgcccaaggggtgttcactgctggcctcagcagtccccac

SEQ ID NO: 1079 - RNA, 140 nt, synthetic construct
  misc_feature 1..140: note = Description of Artificial Sequence: Synthetic polynucleotide
  source 1..140: mol_type = other RNA
tctggctgtggtggggactggttttagagctagaaatagcaagttaaaataaggctagtccgttatcaacttgaaaaagtggcaccgagtcggtgcgcccaaggggtgttcactgctggcctcggcagtccccaccacag

SEQ ID NO: 1080 - RNA, 140 nt, synthetic construct
  misc_feature 1..140: note = Description of Artificial Sequence: Synthetic polynucleotide
  source 1..140: mol_type = other RNA
tctggctgtggtggggactggttttagagctagaaatagcaagttaaaataaggctagtccgttatcaacttgaaaaagtggcaccgagtcggtgcacgcccaaggggtgttcactgctggcctcggcagtccccaccac

SEQ ID NO: 1081 - RNA, 140 nt, synthetic construct
  misc_feature 1..140: note = Description of Artificial Sequence: Synthetic polynucleotide
  source 1..140: mol_type = other RNA
tctggctgtggtggggactggttttagagctagaaatagcaagttaaaataaggctagtccgttatcaacttgaaaaagtggcaccgagtcggtgcacgcccaaggggtgttcactgctggcctcagcagtccccaccac

SEQ ID NO: 1082 - RNA, 140 nt, synthetic construct
  misc_feature 1..140: note = Description of Artificial Sequence: Synthetic polynucleotide
  source 1..140: mol_type = other RNA
tctggctgtggtggggactggttttagagctagaaatagcaagttaaaataaggctagtccgttatcaacttgaaaaagtggcaccgagtcggtgcgcccaaggggtgttcactgctggcctctgcagtccccaccacag

SEQ ID NO: 1083 - RNA, 140 nt, synthetic construct
  misc_feature 1..140: note = Description of Artificial Sequence: Synthetic polynucleotide
  source 1..140: mol_type = other RNA
gtctggctgtggtggggactggttttagagctagaaatagcaagttaaaataaggctagtccgttatcaacttgaaaaagtggcaccgagtcggtgcaaggggtgttcactgctggcctctgcagtccccaccttttttt

SEQ ID NO: 1084 - RNA, 140 nt, synthetic construct
  misc_feature 1..140: note = Description of Artificial Sequence: Synthetic polynucleotide
  source 1..140: mol_type = other RNA
tctggctgtggtggggactggttttagagctagaaatagcaagttaaaataaggctagtccgttatcaacttgaaaaagtggcaccgagtcggtgcgcccaaggggtgttcactgctggcctcagcagtccccaccacag

SEQ ID NO: 1085 - RNA, 140 nt, synthetic construct
  misc_feature 1..140: note = Description of Artificial Sequence: Synthetic polynucleotide
  source 1..140: mol_type = other RNA
tctggctgtggtggggactggttttagagctagaaatagcaagttaaaataaggctagtccgttatcaacttgaaaaagtggcaccgagtcggtgcaaggggtgttcactgctggcctcagcagtccccaccacagccag

SEQ ID NO: 1086 - RNA, 140 nt, synthetic construct
  misc_feature 1..140: note = Description of Artificial Sequence: Synthetic polynucleotide
  source 1..140: mol_type = other RNA
gtctggctgtggtggggactggttttagagctagaaatagcaagttaaaataaggctagtccgttatcaacttgaaaaagtggcaccgagtcggtgcgggtgttcactgctggcctcggcagtccccaccacagtttttt

SEQ ID NO: 1087 - RNA, 140 nt, synthetic construct
  misc_feature 1..140: note = Description of Artificial Sequence: Synthetic polynucleotide
  source 1..140: mol_type = other RNA
tctggctgtggtggggactggttttagagctagaaatagcaagttaaaataaggctagtccgttatcaacttgaaaaagtggcaccgagtcggtgcgccacgcccaaggggtgttcactgctggcctctgcagtccccac

SEQ ID NO: 1088 - RNA, 140 nt, synthetic construct
  misc_feature 1..140: note = Description of Artificial Sequence: Synthetic polynucleotide
  source 1..140: mol_type = other RNA
gtctggctgtggtggggactggttttagagctagaaatagcaagttaaaataaggctagtccgttatcaacttgaaaaagtggcaccgagtcggtgcgggtgttcactgctggcctctgcagtccccaccacagtttttt

SEQ ID NO: 1089 - RNA, 141 nt, synthetic construct
  misc_feature 1..141: note = Description of Artificial Sequence: Synthetic polynucleotide
  source 1..141: mol_type = other RNA
gtctggctgtggtggggactggttttagagctagaaatagcaagttaaaataaggctagtccgttatcaacttgaaaaagtggcaccgagtcggtgcggggtgttcactgctggcctctgcagtccccaccacagtttttt

SEQ ID NO: 1090 - RNA, 141 nt, synthetic construct
  misc_feature 1..141: note = Description of Artificial Sequence: Synthetic polynucleotide
  source 1..141: mol_type = other RNA
gtctggctgtggtggggactggttttagagctagaaatagcaagttaaaataaggctagtccgttatcaacttgaaaaagtggcaccgagtcggtgcggtgttcactgctggcctcagcagtccccaccacagcctttttt

SEQ ID NO: 1091 - RNA, 141 nt, synthetic construct
  misc_feature 1..141: note = Description of Artificial Sequence: Synthetic polynucleotide
  source 1..141: mol_type = other RNA
gtctggctgtggtggggactggttttagagctagaaatagcaagttaaaataaggctagtccgttatcaacttgaaaaagtggcaccgagtcggtgcggtgttcactgctggcctcagcagtccccaccacagcttttttt

SEQ ID NO: 1092 - RNA, 141 nt, synthetic construct
  misc_feature 1..141: note = Description of Artificial Sequence: Synthetic polynucleotide
  source 1..141: mol_type = other RNA
gtctggctgtggtggggactggttttagagctagaaatagcaagttaaaataaggctagtccgttatcaacttgaaaaagtggcaccgagtcggtgcaaggggtgttcactgctggcctcggcagtccccaccattttttt

SEQ ID NO: 1093 - RNA, 141 nt, synthetic construct
  misc_feature 1..141: note = Description of Artificial Sequence: Synthetic polynucleotide
  source 1..141: mol_type = other RNA
gtctggctgtggtggggactggttttagagctagaaatagcaagttaaaataaggctagtccgttatcaacttgaaaaagtggcaccgagtcggtgcggtgttcactgctggcctcggcagtccccaccacagcctttttt

SEQ ID NO: 1094 - RNA, 141 nt, synthetic construct
  misc_feature 1..141: note = Description of Artificial Sequence: Synthetic polynucleotide
  source 1..141: mol_type = other RNA
gtctggctgtggtggggactggttttagagctagaaatagcaagttaaaataaggctagtccgttatcaacttgaaaaagtggcaccgagtcggtgcaaggggtgttcactgctggcctcagcagtccccaccattttttt

SEQ ID NO: 1095 - RNA, 141 nt, synthetic construct
  misc_feature 1..141: note = Description of Artificial Sequence: Synthetic polynucleotide
  source 1..141: mol_type = other RNA
gtctggctgtggtggggactggttttagagctagaaatagcaagttaaaataaggctagtccgttatcaacttgaaaaagtggcaccgagtcggtgcggtgttcactgctggcctccgcagtccccaccacagcctttttt

SEQ ID NO: 1096 - RNA, 141 nt, synthetic construct
  misc_feature 1..141: note = Description of Artificial Sequence: Synthetic polynucleotide
  source 1..141: mol_type = other RNA
gtctggctgtggtggggactggttttagagctagaaatagcaagttaaaataaggctagtccgttatcaacttgaaaaagtggcaccgagtcggtgcgggtgttcactgctggcctctgcagtccccaccacagttttttt

SEQ ID NO: 1097 - RNA, 141 nt, synthetic construct
  misc_feature 1..141: note = Description of Artificial Sequence: Synthetic polynucleotide
  source 1..141: mol_type = other RNA
gtctggctgtggtggggactggttttagagctagaaatagcaagttaaaataaggctagtccgttatcaacttgaaaaagtggcaccgagtcggtgcgggtgttcactgctggcctccgcagtccccaccacagttttttt

SEQ ID NO: 1098 - RNA, 141 nt, synthetic construct
  misc_feature 1..141: note = Description of Artificial Sequence: Synthetic polynucleotide
  source 1..141: mol_type = other RNA
gtctggctgtggtggggactggttttagagctagaaatagcaagttaaaataaggctagtccgttatcaacttgaaaaagtggcaccgagtcggtgcgggtgttcactgctggcctcggcagtccccaccacagttttttt

SEQ ID NO: 1099 - RNA, 141 nt, synthetic construct
  misc_feature 1..141: note = Description of Artificial Sequence: Synthetic polynucleotide
  source 1..141: mol_type = other RNA
gtctggctgtggtggggactggttttagagctagaaatagcaagttaaaataaggctagtccgttatcaacttgaaaaagtggcaccgagtcggtgcggggtgttcactgctggcctctgcagtccccaccacattttttt

SEQ ID NO: 1100 - RNA, 141 nt, synthetic construct
  misc_feature 1..141: note = Description of Artificial Sequence: Synthetic polynucleotide
  source 1..141: mol_type = other RNA
gtctggctgtggtggggactggttttagagctagaaatagcaagttaaaataaggctagtccgttatcaacttgaaaaagtggcaccgagtcggtgcggtgttcactgctggcctccgcagtccccaccacagcttttttt

SEQ ID NO: 1101 - RNA, 141 nt, synthetic construct
  misc_feature 1..141: note = Description of Artificial Sequence: Synthetic polynucleotide
  source 1..141: mol_type = other RNA
tctggctgtggtggggactggttttagagctagaaatagcaagttaaaataaggctagtccgttatcaacttgaaaaagtggcaccgagtcggtgcgccacgcccaaggggtgttcactgctggcctcggcagtccccacc

SEQ ID NO: 1102 - RNA, 141 nt, synthetic construct
  misc_feature 1..141: note = Description of Artificial Sequence: Synthetic polynucleotide
  source 1..141: mol_type = other RNA
gtctggctgtggtggggactggttttagagctagaaatagcaagttaaaataaggctagtccgttatcaacttgaaaaagtggcaccgagtcggtgcaaggggtgttcactgctggcctctgcagtccccaccactttttt

SEQ ID NO: 1103 - RNA, 141 nt, synthetic construct
  misc_feature 1..141: note = Description of Artificial Sequence: Synthetic polynucleotide
  source 1..141: mol_type = other RNA
tctggctgtggtggggactggttttagagctagaaatagcaagttaaaataaggctagtccgttatcaacttgaaaaagtggcaccgagtcggtgcacgcccaaggggtgttcactgctggcctcagcagtccccaccaca

SEQ ID NO: 1104 - RNA, 141 nt, synthetic construct
  misc_feature 1..141: note = Description of Artificial Sequence: Synthetic polynucleotide
  source 1..141: mol_type = other RNA
tctggctgtggtggggactggttttagagctagaaatagcaagttaaaataaggctagtccgttatcaacttgaaaaagtggcaccgagtcggtgcgccacgcccaaggggtgttcactgctggcctcagcagtccccacc

SEQ ID NO: 1105 - RNA, 141 nt, synthetic construct
  misc_feature 1..141: note = Description of Artificial Sequence: Synthetic polynucleotide
  source 1..141: mol_type = other RNA
tctggctgtggtggggactggttttagagctagaaatagcaagttaaaataaggctagtccgttatcaacttgaaaaagtggcaccgagtcggtgcacgcccaaggggtgttcactgctggcctctgcagtccccaccaca

SEQ ID NO: 1106 - RNA, 141 nt, synthetic construct
  misc_feature 1..141: note = Description of Artificial Sequence: Synthetic polynucleotide
  source 1..141: mol_type = other RNA
tctggctgtggtggggactggttttagagctagaaatagcaagttaaaataaggctagtccgttatcaacttgaaaaagtggcaccgagtcggtgctgccacgcccaaggggtgttcactgctggcctcggcagtccccac

SEQ ID NO: 1107 - RNA, 141 nt, synthetic construct
  misc_feature 1..141: note = Description of Artificial Sequence: Synthetic polynucleotide
  source 1..141: mol_type = other RNA
tctggctgtggtggggactggttttagagctagaaatagcaagttaaaataaggctagtccgttatcaacttgaaaaagtggcaccgagtcggtgcgcccaaggggtgttcactgctggcctctgcagtccccaccacagc

SEQ ID NO: 1108 - RNA, 141 nt, synthetic construct
  misc_feature 1..141: note = Description of Artificial Sequence: Synthetic polynucleotide
  source 1..141: mol_type = other RNA
tctggctgtggtggggactggttttagagctagaaatagcaagttaaaataaggctagtccgttatcaacttgaaaaagtggcaccgagtcggtgctgccacgcccaaggggtgttcactgctggcctcagcagtccccac

SEQ ID NO: 1109 - RNA, 141 nt, synthetic construct
  misc_feature 1..141: note = Description of Artificial Sequence: Synthetic polynucleotide
  source 1..141: mol_type = other RNA
tctggctgtggtggggactggttttagagctagaaatagcaagttaaaataaggctagtccgttatcaacttgaaaaagtggcaccgagtcggtgcgcccaaggggtgttcactgctggcctcagcagtccccaccacagc

SEQ ID NO: 1110 - RNA, 141 nt, synthetic construct
  misc_feature 1..141: note = Description of Artificial Sequence: Synthetic polynucleotide
  source 1..141: mol_type = other RNA
tctggctgtggtggggactggttttagagctagaaatagcaagttaaaataaggctagtccgttatcaacttgaaaaagtggcaccgagtcggtgctgccacgcccaaggggtgttcactgctggcctccgcagtccccac

SEQ ID NO: 1111 - RNA, 141 nt, synthetic construct
  misc_feature 1..141: note = Description of Artificial Sequence: Synthetic polynucleotide
  source 1..141: mol_type = other RNA
tctggctgtggtggggactggttttagagctagaaatagcaagttaaaataaggctagtccgttatcaacttgaaaaagtggcaccgagtcggtgcacgcccaaggggtgttcactgctggcctcggcagtccccaccaca

SEQ ID NO: 1112 - RNA, 141 nt, synthetic construct
  misc_feature 1..141: note = Description of Artificial Sequence: Synthetic polynucleotide
  source 1..141: mol_type = other RNA
tctggctgtggtggggactggttttagagctagaaatagcaagttaaaataaggctagtccgttatcaacttgaaaaagtggcaccgagtcggtgcgccacgcccaaggggtgttcactgctggcctctgcagtccccacc

SEQ ID NO: 1113 - RNA, 141 nt, synthetic construct
  misc_feature 1..141: note = Description of Artificial Sequence: Synthetic polynucleotide
  source 1..141: mol_type = other RNA
tctggctgtggtggggactggttttagagctagaaatagcaagttaaaataaggctagtccgttatcaacttgaaaaagtggcaccgagtcggtgcacgcccaaggggtgttcactgctggcctccgcagtccccaccaca

SEQ ID NO: 1114 - RNA, 141 nt, synthetic construct
  misc_feature 1..141: note = Description of Artificial Sequence: Synthetic polynucleotide
  source 1..141: mol_type = other RNA
tctggctgtggtggggactggttttagagctagaaatagcaagttaaaataaggctagtccgttatcaacttgaaaaagtggcaccgagtcggtgcgcccaaggggtgttcactgctggcctcggcagtccccaccacagc

SEQ ID NO: 1115 - RNA, 141 nt, synthetic construct
  misc_feature 1..141: note = Description of Artificial Sequence: Synthetic polynucleotide
  source 1..141: mol_type = other RNA
tctggctgtggtggggactggttttagagctagaaatagcaagttaaaataaggctagtccgttatcaacttgaaaaagtggcaccgagtcggtgctgccacgcccaaggggtgttcactgctggcctctgcagtccccac

SEQ ID NO: 1116 - RNA, 141 nt, synthetic construct
  misc_feature 1..141: note = Description of Artificial Sequence: Synthetic polynucleotide
  source 1..141: mol_type = other RNA
tctggctgtggtggggactggttttagagctagaaatagcaagttaaaataaggctagtccgttatcaacttgaaaaagtggcaccgagtcggtgcgcccaaggggtgttcactgctggcctccgcagtccccaccacagc

SEQ ID NO: 1117 - RNA, 141 nt, synthetic construct
  misc_feature 1..141: note = Description of Artificial Sequence: Synthetic polynucleotide
  source 1..141: mol_type = other RNA
gtctggctgtggtggggactggttttagagctagaaatagcaagttaaaataaggctagtccgttatcaacttgaaaaagtggcaccgagtcggtgcggggtgttcactgctggcctccgcagtccccaccacattttttt

SEQ ID NO: 1118 - RNA, 141 nt, synthetic construct
  misc_feature 1..141: note = Description of Artificial Sequence: Synthetic polynucleotide
  source 1..141: mol_type = other RNA
gtctggctgtggtggggactggttttagagctagaaatagcaagttaaaataaggctagtccgttatcaacttgaaaaagtggcaccgagtcggtgcggggtgttcactgctggcctccgcagtccccaccacagtttttt

SEQ ID NO: 1119 - RNA, 141 nt, synthetic construct
  misc_feature 1..141: note = Description of Artificial Sequence: Synthetic polynucleotide
  source 1..141: mol_type = other RNA
gtctggctgtggtggggactggttttagagctagaaatagcaagttaaaataaggctagtccgttatcaacttgaaaaagtggcaccgagtcggtgcgggtgttcactgctggcctcagcagtccccaccacagttttttt

SEQ ID NO: 1120 - RNA, 141 nt, synthetic construct
  misc_feature 1..141: note = Description of Artificial Sequence: Synthetic polynucleotide
  source 1..141: mol_type = other RNA
gtctggctgtggtggggactggttttagagctagaaatagcaagttaaaataaggctagtccgttatcaacttgaaaaagtggcaccgagtcggtgcggggtgttcactgctggcctcggcagtccccaccacagtttttt

SEQ ID NO: 1121 - RNA, 141 nt, synthetic construct
  misc_feature 1..141: note = Description of Artificial Sequence: Synthetic polynucleotide
  source 1..141: mol_type = other RNA
gtctggctgtggtggggactggttttagagctagaaatagcaagttaaaataaggctagtccgttatcaacttgaaaaagtggcaccgagtcggtgcaaggggtgttcactgctggcctcggcagtccccaccactttttt

SEQ ID NO: 1122 - RNA, 141 nt, synthetic construct
  misc_feature 1..141: note = Description of Artificial Sequence: Synthetic polynucleotide
  source 1..141: mol_type = other RNA
gtctggctgtggtggggactggttttagagctagaaatagcaagttaaaataaggctagtccgttatcaacttgaaaaagtggcaccgagtcggtgcaggggtgttcactgctggcctcagcagtccccaccacttttttt

SEQ ID NO: 1123 - RNA, 141 nt, synthetic construct
  misc_feature 1..141: note = Description of Artificial Sequence: Synthetic polynucleotide
  source 1..141: mol_type = other RNA
gtctggctgtggtggggactggttttagagctagaaatagcaagttaaaataaggctagtccgttatcaacttgaaaaagtggcaccgagtcggtgcaaggggtgttcactgctggcctcagcagtccccaccactttttt

SEQ ID NO: 1124 - RNA, 141 nt, synthetic construct
  misc_feature 1..141: note = Description of Artificial Sequence: Synthetic polynucleotide
  source 1..141: mol_type = other RNA
tctggctgtggtggggactggttttagagctagaaatagcaagttaaaataaggctagtccgttatcaacttgaaaaagtggcaccgagtcggtgcgccacgcccaaggggtgttcactgctggcctccgcagtccccacc

SEQ ID NO: 1125 - RNA, 141 nt, synthetic construct
  misc_feature 1..141: note = Description of Artificial Sequence: Synthetic polynucleotide
  source 1..141: mol_type = other RNA
gtctggctgtggtggggactggttttagagctagaaatagcaagttaaaataaggctagtccgttatcaacttgaaaaagtggcaccgagtcggtgcggggtgttcactgctggcctcagcagtccccaccacagtttttt

SEQ ID NO: 1126 - RNA, 141 nt, synthetic construct
  misc_feature 1..141: note = Description of Artificial Sequence: Synthetic polynucleotide
  source 1..141: mol_type = other RNA
gtctggctgtggtggggactggttttagagctagaaatagcaagttaaaataaggctagtccgttatcaacttgaaaaagtggcaccgagtcggtgcaggggtgttcactgctggcctctgcagtccccaccacttttttt

SEQ ID NO: 1127 - RNA, 141 nt, synthetic construct
  misc_feature 1..141: note = Description of Artificial Sequence: Synthetic polynucleotide
  source 1..141: mol_type = other RNA
gtctggctgtggtggggactggttttagagctagaaatagcaagttaaaataaggctagtccgttatcaacttgaaaaagtggcaccgagtcggtgcggtgttcactgctggcctctgcagtccccaccacagcctttttt

SEQ ID NO: 1128 - RNA, 141 nt, synthetic construct
  misc_feature 1..141: note = Description of Artificial Sequence: Synthetic polynucleotide
  source 1..141: mol_type = other RNA
gtctggctgtggtggggactggttttagagctagaaatagcaagttaaaataaggctagtccgttatcaacttgaaaaagtggcaccgagtcggtgcaaggggtgttcactgctggcctctgcagtccccaccattttttt

SEQ ID NO: 1129 - RNA, 141 nt, synthetic construct
  misc_feature 1..141: note = Description of Artificial Sequence: Synthetic polynucleotide
  source 1..141: mol_type = other RNA
gtctggctgtggtggggactggttttagagctagaaatagcaagttaaaataaggctagtccgttatcaacttgaaaaagtggcaccgagtcggtgcggtgttcactgctggcctcggcagtccccaccacagcttttttt

SEQ ID NO: 1130 - RNA, 141 nt, synthetic construct
  misc_feature 1..141: note = Description of Artificial Sequence: Synthetic polynucleotide
  source 1..141: mol_type = other RNA
gtctggctgtggtggggactggttttagagctagaaatagcaagttaaaataaggctagtccgttatcaacttgaaaaagtggcaccgagtcggtgcggtgttcactgctggcctctgcagtccccaccacagcttttttt

SEQ ID NO: 1131 - RNA, 141 nt, synthetic construct
  misc_feature 1..141: note = Description of Artificial Sequence: Synthetic polynucleotide
  source 1..141: mol_type = other RNA
gtctggctgtggtggggactggttttagagctagaaatagcaagttaaaataaggctagtccgttatcaacttgaaaaagtggcaccgagtcggtgcggggtgttcactgctggcctcagcagtccccaccacattttttt

SEQ ID NO: 1132 - RNA, 141 nt, synthetic construct
  misc_feature 1..141: note = Description of Artificial Sequence: Synthetic polynucleotide
  source 1..141: mol_type = other RNA
gtctggctgtggtggggactggttttagagctagaaatagcaagttaaaataaggctagtccgttatcaacttgaaaaagtggcaccgagtcggtgcaggggtgttcactgctggcctcggcagtccccaccacttttttt

SEQ ID NO: 1133 - RNA, 141 nt, synthetic construct
  misc_feature 1..141: note = Description of Artificial Sequence: Synthetic polynucleotide
  source 1..141: mol_type = other RNA
gtctggctgtggtggggactggttttagagctagaaatagcaagttaaaataaggctagtccgttatcaacttgaaaaagtggcaccgagtcggtgcaaggggtgttcactgctggcctccgcagtccccaccactttttt

SEQ ID NO: 1134 - RNA, 141 nt, synthetic construct
  misc_feature 1..141: note = Description of Artificial Sequence: Synthetic polynucleotide
  source 1..141: mol_type = other RNA
gtctggctgtggtggggactggttttagagctagaaatagcaagttaaaataaggctagtccgttatcaacttgaaaaagtggcaccgagtcggtgcaggggtgttcactgctggcctccgcagtccccaccacttttttt

SEQ ID NO: 1135 - RNA, 141 nt, synthetic construct
  misc_feature 1..141: note = Description of Artificial Sequence: Synthetic polynucleotide
  source 1..141: mol_type = other RNA
gtctggctgtggtggggactggttttagagctagaaatagcaagttaaaataaggctagtccgttatcaacttgaaaaagtggcaccgagtcggtgcaaggggtgttcactgctggcctccgcagtccccaccattttttt

SEQ ID NO: 1136 - RNA, 141 nt, synthetic construct
  misc_feature 1..141: note = Description of Artificial Sequence: Synthetic polynucleotide
  source 1..141: mol_type = other RNA
gtctggctgtggtggggactggttttagagctagaaatagcaagttaaaataaggctagtccgttatcaacttgaaaaagtggcaccgagtcggtgcggggtgttcactgctggcctcggcagtccccaccacattttttt

SEQ ID NO: 1137 - RNA, 142 nt, synthetic construct
  misc_feature 1..142: note = Description of Artificial Sequence: Synthetic polynucleotide
  source 1..142: mol_type = other RNA
gtctggctgtggtggggactggttttagagctagaaatagcaagttaaaataaggctagtccgttatcaacttgaaaaagtggcaccgagtcggtgcgggtgttcactgctggcctctgcagtccccaccacagcttttttt

SEQ ID NO: 1138 - RNA, 142 nt, synthetic construct
  misc_feature 1..142: note = Description of Artificial Sequence: Synthetic polynucleotide
  source 1..142: mol_type = other RNA
gtctggctgtggtggggactggttttagagctagaaatagcaagttaaaataaggctagtccgttatcaacttgaaaaagtggcaccgagtcggtgcaggggtgttcactgctggcctccgcagtccccaccacattttttt

SEQ ID NO: 1139 - RNA, 142 nt, synthetic construct
  misc_feature 1..142: note = Description of Artificial Sequence: Synthetic polynucleotide
  source 1..142: mol_type = other RNA
tctggctgtggtggggactggttttagagctagaaatagcaagttaaaataaggctagtccgttatcaacttgaaaaagtggcaccgagtcggtgcacgcccaaggggtgttcactgctggcctcggcagtccccaccacag

SEQ ID NO: 1140 - RNA, 142 nt, synthetic construct
  misc_feature 1..142: note = Description of Artificial Sequence: Synthetic polynucleotide
  source 1..142: mol_type = other RNA
tctggctgtggtggggactggttttagagctagaaatagcaagttaaaataaggctagtccgttatcaacttgaaaaagtggcaccgagtcggtgcgcccaaggggtgttcactgctggcctcagcagtccccaccacagcc

SEQ ID NO: 1141 - RNA, 142 nt, synthetic construct
  misc_feature 1..142: note = Description of Artificial Sequence: Synthetic polynucleotide
  source 1..142: mol_type = other RNA
tctggctgtggtggggactggttttagagctagaaatagcaagttaaaataaggctagtccgttatcaacttgaaaaagtggcaccgagtcggtgcgccacgcccaaggggtgttcactgctggcctcagcagtccccacca

SEQ ID NO: 1142 - RNA, 142 nt, synthetic construct
  misc_feature 1..142: note = Description of Artificial Sequence: Synthetic polynucleotide
  source 1..142: mol_type = other RNA
gtctggctgtggtggggactggttttagagctagaaatagcaagttaaaataaggctagtccgttatcaacttgaaaaagtggcaccgagtcggtgcggggtgttcactgctggcctccgcagtccccaccacagttttttt

SEQ ID NO: 1143 - RNA, 142 nt, synthetic construct
  misc_feature 1..142: note = Description of Artificial Sequence: Synthetic polynucleotide
  source 1..142: mol_type = other RNA
gtctggctgtggtggggactggttttagagctagaaatagcaagttaaaataaggctagtccgttatcaacttgaaaaagtggcaccgagtcggtgcggtgttcactgctggcctcggcagtccccaccacagccttttttt

SEQ ID NO: 1144 - RNA, 142 nt, synthetic construct
  misc_feature 1..142: note = Description of Artificial Sequence: Synthetic polynucleotide
  source 1..142: mol_type = other RNA
tctggctgtggtggggactggttttagagctagaaatagcaagttaaaataaggctagtccgttatcaacttgaaaaagtggcaccgagtcggtgctgccacgcccaaggggtgttcactgctggcctcggcagtccccacc

SEQ ID NO: 1145 - RNA, 142 nt, synthetic construct
  misc_feature 1..142: note = Description of Artificial Sequence: Synthetic polynucleotide
  source 1..142: mol_type = other RNA
gtctggctgtggtggggactggttttagagctagaaatagcaagttaaaataaggctagtccgttatcaacttgaaaaagtggcaccgagtcggtgcaaggggtgttcactgctggcctcagcagtccccaccacttttttt

SEQ ID NO: 1146 - RNA, 142 nt, synthetic construct
  misc_feature 1..142: note = Description of Artificial Sequence: Synthetic polynucleotide
  source 1..142: mol_type = other RNA
gtctggctgtggtggggactggttttagagctagaaatagcaagttaaaataaggctagtccgttatcaacttgaaaaagtggcaccgagtcggtgcaggggtgttcactgctggcctcggcagtccccaccacagtttttt

SEQ ID NO: 1147 - RNA, 142 nt, synthetic construct
  misc_feature 1..142: note = Description of Artificial Sequence: Synthetic polynucleotide
  source 1..142: mol_type = other RNA
tctggctgtggtggggactggttttagagctagaaatagcaagttaaaataaggctagtccgttatcaacttgaaaaagtggcaccgagtcggtgcgcccaaggggtgttcactgctggcctccgcagtccccaccacagcc

SEQ ID NO: 1148 - RNA, 142 nt, synthetic construct
  misc_feature 1..142: note = Description of Artificial Sequence: Synthetic polynucleotide
  source 1..142: mol_type = other RNA
gtctggctgtggtggggactggttttagagctagaaatagcaagttaaaataaggctagtccgttatcaacttgaaaaagtggcaccgagtcggtgcggtgttcactgctggcctctgcagtccccaccacagccttttttt

SEQ ID NO: 1149 - RNA, 142 nt, synthetic construct
  misc_feature 1..142: note = Description of Artificial Sequence: Synthetic polynucleotide
  source 1..142: mol_type = other RNA
gtctggctgtggtggggactggttttagagctagaaatagcaagttaaaataaggctagtccgttatcaacttgaaaaagtggcaccgagtcggtgcaggggtgttcactgctggcctccgcagtccccaccacagtttttt

SEQ ID NO: 1150 - RNA, 142 nt, synthetic construct
  misc_feature 1..142: note = Description of Artificial Sequence: Synthetic polynucleotide
  source 1..142: mol_type = other RNA
gtctggctgtggtggggactggttttagagctagaaatagcaagttaaaataaggctagtccgttatcaacttgaaaaagtggcaccgagtcggtgcggtgttcactgctggcctccgcagtccccaccacagccttttttt

SEQ ID NO: 1151 - RNA, 142 nt, synthetic construct
  misc_feature 1..142: note = Description of Artificial Sequence: Synthetic polynucleotide
  source 1..142: mol_type = other RNA
tctggctgtggtggggactggttttagagctagaaatagcaagttaaaataaggctagtccgttatcaacttgaaaaagtggcaccgagtcggtgcgccacgcccaaggggtgttcactgctggcctccgcagtccccacca

SEQ ID NO: 1152 - RNA, 142 nt, synthetic construct
  misc_feature 1..142: note = Description of Artificial Sequence: Synthetic polynucleotide
  source 1..142: mol_type = other RNA
gtctggctgtggtggggactggttttagagctagaaatagcaagttaaaataaggctagtccgttatcaacttgaaaaagtggcaccgagtcggtgcgggtgttcactgctggcctcggcagtccccaccacagcctttttt

SEQ ID NO: 1153 - RNA, 142 nt, synthetic construct
  misc_feature 1..142: note = Description of Artificial Sequence: Synthetic polynucleotide
  source 1..142: mol_type = other RNA
gtctggctgtggtggggactggttttagagctagaaatagcaagttaaaataaggctagtccgttatcaacttgaaaaagtggcaccgagtcggtgcggggtgttcactgctggcctctgcagtccccaccacagttttttt

SEQ ID NO: 1154 - RNA, 142 nt, synthetic construct
  misc_feature 1..142: note = Description of Artificial Sequence: Synthetic polynucleotide
  source 1..142: mol_type = other RNA
gtctggctgtggtggggactggttttagagctagaaatagcaagttaaaataaggctagtccgttatcaacttgaaaaagtggcaccgagtcggtgcggtgttcactgctggcctcagcagtccccaccacagccttttttt

SEQ ID NO: 1155 - RNA, 142 nt, synthetic construct
  misc_feature 1..142: note = Description of Artificial Sequence: Synthetic polynucleotide
  source 1..142: mol_type = other RNA
tctggctgtggtggggactggttttagagctagaaatagcaagttaaaataaggctagtccgttatcaacttgaaaaagtggcaccgagtcggtgctgccacgcccaaggggtgttcactgctggcctcagcagtccccacc

SEQ ID NO: 1156 - RNA, 142 nt, synthetic construct
  misc_feature 1..142: note = Description of Artificial Sequence: Synthetic polynucleotide
  source 1..142: mol_type = other RNA
gtctggctgtggtggggactggttttagagctagaaatagcaagttaaaataaggctagtccgttatcaacttgaaaaagtggcaccgagtcggtgcaaggggtgttcactgctggcctctgcagtccccaccacttttttt

SEQ ID NO: 1157 - RNA, 142 nt, synthetic construct
  misc_feature 1..142: note = Description of Artificial Sequence: Synthetic polynucleotide
  source 1..142: mol_type = other RNA
gtctggctgtggtggggactggttttagagctagaaatagcaagttaaaataaggctagtccgttatcaacttgaaaaagtggcaccgagtcggtgcgggtgttcactgctggcctccgcagtccccaccacagcttttttt

SEQ ID NO: 1158 - RNA, 142 nt, synthetic construct
  misc_feature 1..142: note = Description of Artificial Sequence: Synthetic polynucleotide
  source 1..142: mol_type = other RNA
gtctggctgtggtggggactggttttagagctagaaatagcaagttaaaataaggctagtccgttatcaacttgaaaaagtggcaccgagtcggtgcgggtgttcactgctggcctcagcagtccccaccacagcttttttt

SEQ ID NO: 1159 - RNA, 142 nt, synthetic construct
  misc_feature 1..142: note = Description of Artificial Sequence: Synthetic polynucleotide
  source 1..142: mol_type = other RNA
tctggctgtggtggggactggttttagagctagaaatagcaagttaaaataaggctagtccgttatcaacttgaaaaagtggcaccgagtcggtgcacgcccaaggggtgttcactgctggcctctgcagtccccaccacag

SEQ ID NO: 1160 - RNA, 142 nt, synthetic construct
  misc_feature 1..142: note = Description of Artificial Sequence: Synthetic polynucleotide
  source 1..142: mol_type = other RNA
tctggctgtggtggggactggttttagagctagaaatagcaagttaaaataaggctagtccgttatcaacttgaaaaagtggcaccgagtcggtgctgccacgcccaaggggtgttcactgctggcctctgcagtccccacc

SEQ ID NO: 1161 - RNA, 142 nt, synthetic construct
  misc_feature 1..142: note = Description of Artificial Sequence: Synthetic polynucleotide
  source 1..142: mol_type = other RNA
gtctggctgtggtggggactggttttagagctagaaatagcaagttaaaataaggctagtccgttatcaacttgaaaaagtggcaccgagtcggtgcaggggtgttcactgctggcctctgcagtccccaccacagtttttt

SEQ ID NO: 1162 - RNA, 142 nt, synthetic construct
  misc_feature 1..142: note = Description of Artificial Sequence: Synthetic polynucleotide
  source 1..142: mol_type = other RNA
gtctggctgtggtggggactggttttagagctagaaatagcaagttaaaataaggctagtccgttatcaacttgaaaaagtggcaccgagtcggtgcggggtgttcactgctggcctcagcagtccccaccacagttttttt

SEQ ID NO: 1163 - RNA, 142 nt, synthetic construct
  misc_feature 1..142: note = Description of Artificial Sequence: Synthetic polynucleotide
  source 1..142: mol_type = other RNA
tctggctgtggtggggactggttttagagctagaaatagcaagttaaaataaggctagtccgttatcaacttgaaaaagtggcaccgagtcggtgcgcccaaggggtgttcactgctggcctctgcagtccccaccacagcc

SEQ ID NO: 1164 - RNA, 142 nt, synthetic construct
  misc_feature 1..142: note = Description of Artificial Sequence: Synthetic polynucleotide
  source 1..142: mol_type = other RNA
gtctggctgtggtggggactggttttagagctagaaatagcaagttaaaataaggctagtccgttatcaacttgaaaaagtggcaccgagtcggtgcaggggtgttcactgctggcctcggcagtccccaccacattttttt

SEQ ID NO: 1165 - RNA, 142 nt, synthetic construct
  misc_feature 1..142: note = Description of Artificial Sequence: Synthetic polynucleotide
  source 1..142: mol_type = other RNA
gtctggctgtggtggggactggttttagagctagaaatagcaagttaaaataaggctagtccgttatcaacttgaaaaagtggcaccgagtcggtgcggggtgttcactgctggcctcggcagtccccaccacagttttttt

SEQ ID NO: 1166 - RNA, 142 nt, synthetic construct
  misc_feature 1..142: note = Description of Artificial Sequence: Synthetic polynucleotide
  source 1..142: mol_type = other RNA
tctggctgtggtggggactggttttagagctagaaatagcaagttaaaataaggctagtccgttatcaacttgaaaaagtggcaccgagtcggtgctgccacgcccaaggggtgttcactgctggcctccgcagtccccacc

SEQ ID NO: 1167 - RNA, 142 nt, synthetic construct
  misc_feature 1..142: note = Description of Artificial Sequence: Synthetic polynucleotide
  source 1..142: mol_type = other RNA
tctggctgtggtggggactggttttagagctagaaatagcaagttaaaataaggctagtccgttatcaacttgaaaaagtggcaccgagtcggtgcgccacgcccaaggggtgttcactgctggcctcggcagtccccacca

SEQ ID NO: 1168 - RNA, 142 nt, synthetic construct
  misc_feature 1..142: note = Description of Artificial Sequence: Synthetic polynucleotide
  source 1..142: mol_type = other RNA
tctggctgtggtggggactggttttagagctagaaatagcaagttaaaataaggctagtccgttatcaacttgaaaaagtggcaccgagtcggtgcacgcccaaggggtgttcactgctggcctcagcagtccccaccacag

SEQ ID NO: 1169 - RNA, 142 nt, synthetic construct
  misc_feature 1..142: note = Description of Artificial Sequence: Synthetic polynucleotide
  source 1..142: mol_type = other RNA
tctggctgtggtggggactggttttagagctagaaatagcaagttaaaataaggctagtccgttatcaacttgaaaaagtggcaccgagtcggtgcgcccaaggggtgttcactgctggcctcggcagtccccaccacagcc

SEQ ID NO: 1170 - RNA, 142 nt, synthetic construct
  misc_feature 1..142: note = Description of Artificial Sequence: Synthetic polynucleotide
  source 1..142: mol_type = other RNA
gtctggctgtggtggggactggttttagagctagaaatagcaagttaaaataaggctagtccgttatcaacttgaaaaagtggcaccgagtcggtgcaggggtgttcactgctggcctcagcagtccccaccacagtttttt

SEQ ID NO: 1171 - RNA, 142 nt, synthetic construct
  misc_feature 1..142: note = Description of Artificial Sequence: Synthetic polynucleotide
  source 1..142: mol_type = other RNA
tctggctgtggtggggactggttttagagctagaaatagcaagttaaaataaggctagtccgttatcaacttgaaaaagtggcaccgagtcggtgcgccacgcccaaggggtgttcactgctggcctctgcagtccccacca

SEQ ID NO: 1172 - RNA, 142 nt, synthetic construct
  misc_feature 1..142: note = Description of Artificial Sequence: Synthetic polynucleotide
  source 1..142: mol_type = other RNA
tctggctgtggtggggactggttttagagctagaaatagcaagttaaaataaggctagtccgttatcaacttgaaaaagtggcaccgagtcggtgcacgcccaaggggtgttcactgctggcctccgcagtccccaccacag

SEQ ID NO: 1173 - RNA, 142 nt, synthetic construct
  misc_feature 1..142: note = Description of Artificial Sequence: Synthetic polynucleotide
  source 1..142: mol_type = other RNA
gtctggctgtggtggggactggttttagagctagaaatagcaagttaaaataaggctagtccgttatcaacttgaaaaagtggcaccgagtcggtgcaggggtgttcactgctggcctctgcagtccccaccacattttttt

SEQ ID NO: 1174 - RNA, 142 nt, synthetic construct
  misc_feature 1..142: note = Description of Artificial Sequence: Synthetic polynucleotide
  source 1..142: mol_type = other RNA
gtctggctgtggtggggactggttttagagctagaaatagcaagttaaaataaggctagtccgttatcaacttgaaaaagtggcaccgagtcggtgcgggtgttcactgctggcctcagcagtccccaccacagcctttttt

SEQ ID NO: 1175 - RNA, 142 nt, synthetic construct
  misc_feature 1..142: note = Description of Artificial Sequence: Synthetic polynucleotide
  source 1..142: mol_type = other RNA
gtctggctgtggtggggactggttttagagctagaaatagcaagttaaaataaggctagtccgttatcaacttgaaaaagtggcaccgagtcggtgcaaggggtgttcactgctggcctcggcagtccccaccacttttttt

SEQ ID NO: 1176 - RNA, 142 nt, synthetic construct
  misc_feature 1..142: note = Description of Artificial Sequence: Synthetic polynucleotide
  source 1..142: mol_type = other RNA
gtctggctgtggtggggactggttttagagctagaaatagcaagttaaaataaggctagtccgttatcaacttgaaaaagtggcaccgagtcggtgcgggtgttcactgctggcctcggcagtccccaccacagcttttttt

SEQ ID NO: 1177 - RNA, 142 nt, synthetic construct
  misc_feature 1..142: note = Description of Artificial Sequence: Synthetic polynucleotide
  source 1..142: mol_type = other RNA
gtctggctgtggtggggactggttttagagctagaaatagcaagttaaaataaggctagtccgttatcaacttgaaaaagtggcaccgagtcggtgcaaggggtgttcactgctggcctccgcagtccccaccacttttttt

SEQ ID NO: 1178 - RNA, 142 nt, synthetic construct
  misc_feature 1..142: note = Description of Artificial Sequence: Synthetic polynucleotide
  source 1..142: mol_type = other RNA
gtctggctgtggtggggactggttttagagctagaaatagcaagttaaaataaggctagtccgttatcaacttgaaaaagtggcaccgagtcggtgcaggggtgttcactgctggcctcagcagtccccaccacattttttt

SEQ ID NO: 1179 - RNA, 142 nt, synthetic construct
  misc_feature 1..142: note = Description of Artificial Sequence: Synthetic polynucleotide
  source 1..142: mol_type = other RNA
gtctggctgtggtggggactggttttagagctagaaatagcaagttaaaataaggctagtccgttatcaacttgaaaaagtggcaccgagtcggtgcgggtgttcactgctggcctctgcagtccccaccacagcctttttt

SEQ ID NO: 1180 - RNA, 142 nt, synthetic construct
  misc_feature 1..142: note = Description of Artificial Sequence: Synthetic polynucleotide
  source 1..142: mol_type = other RNA
gtctggctgtggtggggactggttttagagctagaaatagcaagttaaaataaggctagtccgttatcaacttgaaaaagtggcaccgagtcggtgcgggtgttcactgctggcctccgcagtccccaccacagcctttttt

SEQ ID NO: 1181 - RNA, 143 nt, synthetic construct
  misc_feature 1..143: note = Description of Artificial Sequence: Synthetic polynucleotide
  source 1..143: mol_type = other RNA
gtctggctgtggtggggactggttttagagctagaaatagcaagttaaaataaggctagtccgttatcaacttgaaaaagtggcaccgagtcggtgcgcccaaggggtgttcactgctggcctccgcagtccccacttttttt

SEQ ID NO: 1182 - RNA, 143 nt, synthetic construct
  misc_feature 1..143: note = Description of Artificial Sequence: Synthetic polynucleotide
  source 1..143: mol_type = other RNA
gtctggctgtggtggggactggttttagagctagaaatagcaagttaaaataaggctagtccgttatcaacttgaaaaagtggcaccgagtcggtgcggggtgttcactgctggcctccgcagtccccaccacagcctttttt

SEQ ID NO: 1183 - RNA, 143 nt, synthetic construct
  misc_feature 1..143: note = Description of Artificial Sequence: Synthetic polynucleotide
  source 1..143: mol_type = other RNA
gtctggctgtggtggggactggttttagagctagaaatagcaagttaaaataaggctagtccgttatcaacttgaaaaagtggcaccgagtcggtgcaggggtgttcactgctggcctcggcagtccccaccacagttttttt

SEQ ID NO: 1184 - RNA, 143 nt, synthetic construct
  misc_feature 1..143: note = Description of Artificial Sequence: Synthetic polynucleotide
  source 1..143: mol_type = other RNA
gtctggctgtggtggggactggttttagagctagaaatagcaagttaaaataaggctagtccgttatcaacttgaaaaagtggcaccgagtcggtgcggtgttcactgctggcctccgcagtccccaccacagccagtttttt

SEQ ID NO: 1185 - RNA, 143 nt, synthetic construct
  misc_feature 1..143: note = Description of Artificial Sequence: Synthetic polynucleotide
  source 1..143: mol_type = other RNA
tctggctgtggtggggactggttttagagctagaaatagcaagttaaaataaggctagtccgttatcaacttgaaaaagtggcaccgagtcggtgcacgcccaaggggtgttcactgctggcctcagcagtccccaccacagc

SEQ ID NO: 1186 - RNA, 143 nt, synthetic construct
  misc_feature 1..143: note = Description of Artificial Sequence: Synthetic polynucleotide
  source 1..143: mol_type = other RNA
gtctggctgtggtggggactggttttagagctagaaatagcaagttaaaataaggctagtccgttatcaacttgaaaaagtggcaccgagtcggtgcaaggggtgttcactgctggcctccgcagtccccaccacagtttttt

SEQ ID NO: 1187 - RNA, 143 nt, synthetic construct
  misc_feature 1..143: note = Description of Artificial Sequence: Synthetic polynucleotide
  source 1..143: mol_type = other RNA
tctggctgtggtggggactggttttagagctagaaatagcaagttaaaataaggctagtccgttatcaacttgaaaaagtggcaccgagtcggtgcactgccacgcccaaggggtgttcactgctggcctcggcagtccccac

SEQ ID NO: 1188 - RNA, 143 nt, synthetic construct
  misc_feature 1..143: note = Description of Artificial Sequence: Synthetic polynucleotide
  source 1..143: mol_type = other RNA
gtctggctgtggtggggactggttttagagctagaaatagcaagttaaaataaggctagtccgttatcaacttgaaaaagtggcaccgagtcggtgcaaggggtgttcactgctggcctccgcagtccccaccacattttttt

SEQ ID NO: 1189 - RNA, 143 nt, synthetic construct
  misc_feature 1..143: note = Description of Artificial Sequence: Synthetic polynucleotide
  source 1..143: mol_type = other RNA
gtctggctgtggtggggactggttttagagctagaaatagcaagttaaaataaggctagtccgttatcaacttgaaaaagtggcaccgagtcggtgcgggtgttcactgctggcctcggcagtccccaccacagccttttttt

SEQ ID NO: 1190 - RNA, 143 nt, synthetic construct
  misc_feature 1..143: note = Description of Artificial Sequence: Synthetic polynucleotide
  source 1..143: mol_type = other RNA
tctggctgtggtggggactggttttagagctagaaatagcaagttaaaataaggctagtccgttatcaacttgaaaaagtggcaccgagtcggtgcgccacgcccaaggggtgttcactgctggcctcggcagtccccaccac

SEQ ID NO: 1191 - RNA, 143 nt, synthetic construct
  misc_feature 1..143: note = Description of Artificial Sequence: Synthetic polynucleotide
  source 1..143: mol_type = other RNA
tctggctgtggtggggactggttttagagctagaaatagcaagttaaaataaggctagtccgttatcaacttgaaaaagtggcaccgagtcggtgcacgcccaaggggtgttcactgctggcctctgcagtccccaccacagc

SEQ ID NO: 1192 - RNA, 143 nt, synthetic construct
  misc_feature 1..143: note = Description of Artificial Sequence: Synthetic polynucleotide
  source 1..143: mol_type = other RNA
gtctggctgtggtggggactggttttagagctagaaatagcaagttaaaataaggctagtccgttatcaacttgaaaaagtggcaccgagtcggtgcaaggggtgttcactgctggcctcagcagtccccaccacattttttt

SEQ ID NO: 1193 - RNA, 143 nt, synthetic construct
  misc_feature 1..143: note = Description of Artificial Sequence: Synthetic polynucleotide
  source 1..143: mol_type = other RNA
gtctggctgtggtggggactggttttagagctagaaatagcaagttaaaataaggctagtccgttatcaacttgaaaaagtggcaccgagtcggtgcaaggggtgttcactgctggcctcagcagtccccaccacagtttttt

SEQ ID NO: 1194 - RNA, 143 nt, synthetic construct
  misc_feature 1..143: note = Description of Artificial Sequence: Synthetic polynucleotide
  source 1..143: mol_type = other RNA
gtctggctgtggtggggactggttttagagctagaaatagcaagttaaaataaggctagtccgttatcaacttgaaaaagtggcaccgagtcggtgcggggtgttcactgctggcctctgcagtccccaccacagcttttttt

SEQ ID NO: 1195 - RNA, 143 nt, synthetic construct
  misc_feature 1..143: note = Description of Artificial Sequence: Synthetic polynucleotide
  source 1..143: mol_type = other RNA
gtctggctgtggtggggactggttttagagctagaaatagcaagttaaaataaggctagtccgttatcaacttgaaaaagtggcaccgagtcggtgcaggggtgttcactgctggcctcagcagtccccaccacagttttttt

SEQ ID NO: 1196 - RNA, 143 nt, synthetic construct
  misc_feature 1..143: note = Description of Artificial Sequence: Synthetic polynucleotide
  source 1..143: mol_type = other RNA
gtctggctgtggtggggactggttttagagctagaaatagcaagttaaaataaggctagtccgttatcaacttgaaaaagtggcaccgagtcggtgcggggtgttcactgctggcctcggcagtccccaccacagcttttttt

SEQ ID NO: 1197 - RNA, 143 nt, synthetic construct
  misc_feature 1..143: note = Description of Artificial Sequence: Synthetic polynucleotide
  source 1..143: mol_type = other RNA
tctggctgtggtggggactggttttagagctagaaatagcaagttaaaataaggctagtccgttatcaacttgaaaaagtggcaccgagtcggtgcacgcccaaggggtgttcactgctggcctcggcagtccccaccacagc

SEQ ID NO: 1198 - RNA, 143 nt, synthetic construct
  misc_feature 1..143: note = Description of Artificial Sequence: Synthetic polynucleotide
  source 1..143: mol_type = other RNA
gtctggctgtggtggggactggttttagagctagaaatagcaagttaaaataaggctagtccgttatcaacttgaaaaagtggcaccgagtcggtgcgggtgttcactgctggcctcagcagtccccaccacagccttttttt

SEQ ID NO: 1199 - RNA, 143 nt, synthetic construct
  misc_feature 1..143: note = Description of Artificial Sequence: Synthetic polynucleotide
  source 1..143: mol_type = other RNA
tctggctgtggtggggactggttttagagctagaaatagcaagttaaaataaggctagtccgttatcaacttgaaaaagtggcaccgagtcggtgctgccacgcccaaggggtgttcactgctggcctcggcagtccccacca

SEQ ID NO: 1200 - RNA, 143 nt, synthetic construct
  misc_feature 1..143: note = Description of Artificial Sequence: Synthetic polynucleotide
  source 1..143: mol_type = other RNA
gtctggctgtggtggggactggttttagagctagaaatagcaagttaaaataaggctagtccgttatcaacttgaaaaagtggcaccgagtcggtgcggggtgttcactgctggcctcagcagtccccaccacagcttttttt

SEQ ID NO: 1201 - RNA, 143 nt, synthetic construct
  misc_feature 1..143: note = Description of Artificial Sequence: Synthetic polynucleotide
  source 1..143: mol_type = other RNA
gtctggctgtggtggggactggttttagagctagaaatagcaagttaaaataaggctagtccgttatcaacttgaaaaagtggcaccgagtcggtgcaggggtgttcactgctggcctccgcagtccccaccacagttttttt

SEQ ID NO: 1202 - RNA, 143 nt, synthetic construct
  misc_feature 1..143: note = Description of Artificial Sequence: Synthetic polynucleotide
  source 1..143: mol_type = other RNA
gtctggctgtggtggggactggttttagagctagaaatagcaagttaaaataaggctagtccgttatcaacttgaaaaagtggcaccgagtcggtgcggggtgttcactgctggcctcagcagtccccaccacagcctttttt

SEQ ID NO: 1203 - RNA, 143 nt, synthetic construct
  misc_feature 1..143: note = Description of Artificial Sequence: Synthetic polynucleotide
  source 1..143: mol_type = other RNA
tctggctgtggtggggactggttttagagctagaaatagcaagttaaaataaggctagtccgttatcaacttgaaaaagtggcaccgagtcggtgcactgccacgcccaaggggtgttcactgctggcctccgcagtccccac

SEQ ID NO: 1204 - RNA, 143 nt, synthetic construct
  misc_feature 1..143: note = Description of Artificial Sequence: Synthetic polynucleotide
  source 1..143: mol_type = other RNA
gtctggctgtggtggggactggttttagagctagaaatagcaagttaaaataaggctagtccgttatcaacttgaaaaagtggcaccgagtcggtgcgcccaaggggtgttcactgctggcctctgcagtccccacttttttt

SEQ ID NO: 1205 - RNA, 143 nt, synthetic construct
  misc_feature 1..143: note = Description of Artificial Sequence: Synthetic polynucleotide
  source 1..143: mol_type = other RNA
gtctggctgtggtggggactggttttagagctagaaatagcaagttaaaataaggctagtccgttatcaacttgaaaaagtggcaccgagtcggtgcaggggtgttcactgctggcctctgcagtccccaccacagttttttt

SEQ ID NO: 1206 - RNA, 143 nt, synthetic construct
  misc_feature 1..143: note = Description of Artificial Sequence: Synthetic polynucleotide
  source 1..143: mol_type = other RNA
gtctggctgtggtggggactggttttagagctagaaatagcaagttaaaataaggctagtccgttatcaacttgaaaaagtggcaccgagtcggtgcgcccaaggggtgttcactgctggcctcagcagtccccacttttttt

SEQ ID NO: 1207 - RNA, 143 nt, synthetic construct
  misc_feature 1..143: note = Description of Artificial Sequence: Synthetic polynucleotide
  source 1..143: mol_type = other RNA
gtctggctgtggtggggactggttttagagctagaaatagcaagttaaaataaggctagtccgttatcaacttgaaaaagtggcaccgagtcggtgcaaggggtgttcactgctggcctcggcagtccccaccacagtttttt

SEQ ID NO: 1208 - RNA, 143 nt, synthetic construct
  misc_feature 1..143: note = Description of Artificial Sequence: Synthetic polynucleotide
  source 1..143: mol_type = other RNA
tctggctgtggtggggactggttttagagctagaaatagcaagttaaaataaggctagtccgttatcaacttgaaaaagtggcaccgagtcggtgcactgccacgcccaaggggtgttcactgctggcctctgcagtccccac

SEQ ID NO: 1209 - RNA, 143 nt, synthetic construct
  misc_feature 1..143: note = Description of Artificial Sequence: Synthetic polynucleotide
  source 1..143: mol_type = other RNA
tctggctgtggtggggactggttttagagctagaaatagcaagttaaaataaggctagtccgttatcaacttgaaaaagtggcaccgagtcggtgctgccacgcccaaggggtgttcactgctggcctccgcagtccccacca

SEQ ID NO: 1210 - RNA, 143 nt, synthetic construct
  misc_feature 1..143: note = Description of Artificial Sequence: Synthetic polynucleotide
  source 1..143: mol_type = other RNA
tctggctgtggtggggactggttttagagctagaaatagcaagttaaaataaggctagtccgttatcaacttgaaaaagtggcaccgagtcggtgctgccacgcccaaggggtgttcactgctggcctcagcagtccccacca

SEQ ID NO: 1211 - RNA, 143 nt, synthetic construct
  misc_feature 1..143: note = Description of Artificial Sequence: Synthetic polynucleotide
  source 1..143: mol_type = other RNA
gtctggctgtggtggggactggttttagagctagaaatagcaagttaaaataaggctagtccgttatcaacttgaaaaagtggcaccgagtcggtgcaaggggtgttcactgctggcctctgcagtccccaccacagtttttt

SEQ ID NO: 1212 - RNA, 143 nt, synthetic construct
  misc_feature 1..143: note = Description of Artificial Sequence: Synthetic polynucleotide
  source 1..143: mol_type = other RNA
gtctggctgtggtggggactggttttagagctagaaatagcaagttaaaataaggctagtccgttatcaacttgaaaaagtggcaccgagtcggtgcggtgttcactgctggcctctgcagtccccaccacagccagtttttt

SEQ ID NO: 1213 - RNA, 143 nt, synthetic construct
  misc_feature 1..143: note = Description of Artificial Sequence: Synthetic polynucleotide
  source 1..143: mol_type = other RNA
gtctggctgtggtggggactggttttagagctagaaatagcaagttaaaataaggctagtccgttatcaacttgaaaaagtggcaccgagtcggtgcggtgttcactgctggcctcggcagtccccaccacagccagtttttt

SEQ ID NO: 1214 - RNA, 143 nt, synthetic construct
  misc_feature 1..143: note = Description of Artificial Sequence: Synthetic polynucleotide
  source 1..143: mol_type = other RNA
gtctggctgtggtggggactggttttagagctagaaatagcaagttaaaataaggctagtccgttatcaacttgaaaaagtggcaccgagtcggtgcggggtgttcactgctggcctctgcagtccccaccacagcctttttt

SEQ ID NO: 1215 - RNA, 143 nt, synthetic construct
  misc_feature 1..143: note = Description of Artificial Sequence: Synthetic polynucleotide
  source 1..143: mol_type = other RNA
gtctggctgtggtggggactggttttagagctagaaatagcaagttaaaataaggctagtccgttatcaacttgaaaaagtggcaccgagtcggtgcggtgttcactgctggcctcagcagtccccaccacagccagtttttt

SEQ ID NO: 1216 - RNA, 143 nt, synthetic construct
  misc_feature 1..143: note = Description of Artificial Sequence: Synthetic polynucleotide
  source 1..143: mol_type = other RNA
gtctggctgtggtggggactggttttagagctagaaatagcaagttaaaataaggctagtccgttatcaacttgaaaaagtggcaccgagtcggtgcggggtgttcactgctggcctccgcagtccccaccacagcttttttt

SEQ ID NO: 1217 - RNA, 143 nt, synthetic construct
  misc_feature 1..143: note = Description of Artificial Sequence: Synthetic polynucleotide
  source 1..143: mol_type = other RNA
gtctggctgtggtggggactggttttagagctagaaatagcaagttaaaataaggctagtccgttatcaacttgaaaaagtggcaccgagtcggtgcggggtgttcactgctggcctcggcagtccccaccacagcctttttt

SEQ ID NO: 1218 - RNA, 143 nt, synthetic construct
  misc_feature 1..143: note = Description of Artificial Sequence: Synthetic polynucleotide
  source 1..143: mol_type = other RNA
tctggctgtggtggggactggttttagagctagaaatagcaagttaaaataaggctagtccgttatcaacttgaaaaagtggcaccgagtcggtgcgccacgcccaaggggtgttcactgctggcctctgcagtccccaccac

SEQ ID NO: 1219 - RNA, 143 nt, synthetic construct
  misc_feature 1..143: note = Description of Artificial Sequence: Synthetic polynucleotide
  source 1..143: mol_type = other RNA
tctggctgtggtggggactggttttagagctagaaatagcaagttaaaataaggctagtccgttatcaacttgaaaaagtggcaccgagtcggtgctgccacgcccaaggggtgttcactgctggcctctgcagtccccacca

SEQ ID NO: 1220 - RNA, 143 nt, synthetic construct
  misc_feature 1..143: note = Description of Artificial Sequence: Synthetic polynucleotide
  source 1..143: mol_type = other RNA
tctggctgtggtggggactggttttagagctagaaatagcaagttaaaataaggctagtccgttatcaacttgaaaaagtggcaccgagtcggtgcgccacgcccaaggggtgttcactgctggcctccgcagtccccaccac

SEQ ID NO: 1221 - RNA, 143 nt, synthetic construct
  misc_feature 1..143: note = Description of Artificial Sequence: Synthetic polynucleotide
  source 1..143: mol_type = other RNA
tctggctgtggtggggactggttttagagctagaaatagcaagttaaaataaggctagtccgttatcaacttgaaaaagtggcaccgagtcggtgcacgcccaaggggtgttcactgctggcctccgcagtccccaccacagc

SEQ ID NO: 1222 - RNA, 143 nt, synthetic construct
  misc_feature 1..143: note = Description of Artificial Sequence: Synthetic polynucleotide
  source 1..143: mol_type = other RNA
tctggctgtggtggggactggttttagagctagaaatagcaagttaaaataaggctagtccgttatcaacttgaaaaagtggcaccgagtcggtgcgccacgcccaaggggtgttcactgctggcctcagcagtccccaccac

SEQ ID NO: 1223 - RNA, 143 nt, synthetic construct
  misc_feature 1..143: note = Description of Artificial Sequence: Synthetic polynucleotide
  source 1..143: mol_type = other RNA
tctggctgtggtggggactggttttagagctagaaatagcaagttaaaataaggctagtccgttatcaacttgaaaaagtggcaccgagtcggtgcactgccacgcccaaggggtgttcactgctggcctcagcagtccccac

SEQ ID NO: 1224 - RNA, 143 nt, synthetic construct
  misc_feature 1..143: note = Description of Artificial Sequence: Synthetic polynucleotide
  source 1..143: mol_type = other RNA
gtctggctgtggtggggactggttttagagctagaaatagcaagttaaaataaggctagtccgttatcaacttgaaaaagtggcaccgagtcggtgcgggtgttcactgctggcctctgcagtccccaccacagccttttttt

SEQ ID NO: 1225 - RNA, 143 nt, synthetic construct
  misc_feature 1..143: note = Description of Artificial Sequence: Synthetic polynucleotide
  source 1..143: mol_type = other RNA
gtctggctgtggtggggactggttttagagctagaaatagcaagttaaaataaggctagtccgttatcaacttgaaaaagtggcaccgagtcggtgcaaggggtgttcactgctggcctcggcagtccccaccacattttttt

SEQ ID NO: 1226 - RNA, 143 nt, synthetic construct
  misc_feature 1..143: note = Description of Artificial Sequence: Synthetic polynucleotide
  source 1..143: mol_type = other RNA
gtctggctgtggtggggactggttttagagctagaaatagcaagttaaaataaggctagtccgttatcaacttgaaaaagtggcaccgagtcggtgcgggtgttcactgctggcctccgcagtccccaccacagccttttttt

SEQ ID NO: 1227 - RNA, 143 nt, synthetic construct
  misc_feature 1..143: note = Description of Artificial Sequence: Synthetic polynucleotide
  source 1..143: mol_type = other RNA
gtctggctgtggtggggactggttttagagctagaaatagcaagttaaaataaggctagtccgttatcaacttgaaaaagtggcaccgagtcggtgcgcccaaggggtgttcactgctggcctcggcagtccccacttttttt

SEQ ID NO: 1228 - RNA, 143 nt, synthetic construct
  misc_feature 1..143: note = Description of Artificial Sequence: Synthetic polynucleotide
  source 1..143: mol_type = other RNA
gtctggctgtggtggggactggttttagagctagaaatagcaagttaaaataaggctagtccgttatcaacttgaaaaagtggcaccgagtcggtgcaaggggtgttcactgctggcctctgcagtccccaccacattttttt

SEQ ID NO: 1229 - RNA, 144 nt, synthetic construct
  misc_feature 1..144: note = Description of Artificial Sequence: Synthetic polynucleotide
  source 1..144: mol_type = other RNA
tctggctgtggtggggactggttttagagctagaaatagcaagttaaaataaggctagtccgttatcaacttgaaaaagtggcaccgagtcggtgcacgcccaaggggtgttcactgctggcctctgcagtccccaccacagcc

SEQ ID NO: 1230 - RNA, 144 nt, synthetic construct
  misc_feature 1..144: note = Description of Artificial Sequence: Synthetic polynucleotide
  source 1..144: mol_type = other RNA
tctggctgtggtggggactggttttagagctagaaatagcaagttaaaataaggctagtccgttatcaacttgaaaaagtggcaccgagtcggtgctgccacgcccaaggggtgttcactgctggcctcagcagtccccaccac

SEQ ID NO: 1231 - RNA, 144 nt, synthetic construct
  misc_feature 1..144: note = Description of Artificial Sequence: Synthetic polynucleotide
  source 1..144: mol_type = other RNA
gtctggctgtggtggggactggttttagagctagaaatagcaagttaaaataaggctagtccgttatcaacttgaaaaagtggcaccgagtcggtgcgggtgttcactgctggcctctgcagtccccaccacagccagtttttt

SEQ ID NO: 1232 - RNA, 144 nt, synthetic construct
  misc_feature 1..144: note = Description of Artificial Sequence: Synthetic polynucleotide
  source 1..144: mol_type = other RNA
gtctggctgtggtggggactggttttagagctagaaatagcaagttaaaataaggctagtccgttatcaacttgaaaaagtggcaccgagtcggtgcgcccaaggggtgttcactgctggcctccgcagtccccaccttttttt

SEQ ID NO: 1233 - RNA, 144 nt, synthetic construct
  misc_feature 1..144: note = Description of Artificial Sequence: Synthetic polynucleotide
  source 1..144: mol_type = other RNA
tctggctgtggtggggactggttttagagctagaaatagcaagttaaaataaggctagtccgttatcaacttgaaaaagtggcaccgagtcggtgctgccacgcccaaggggtgttcactgctggcctcggcagtccccaccac

SEQ ID NO: 1234 - RNA, 144 nt, synthetic construct
  misc_feature 1..144: note = Description of Artificial Sequence: Synthetic polynucleotide
  source 1..144: mol_type = other RNA
gtctggctgtggtggggactggttttagagctagaaatagcaagttaaaataaggctagtccgttatcaacttgaaaaagtggcaccgagtcggtgcgggtgttcactgctggcctccgcagtccccaccacagccagtttttt

SEQ ID NO: 1235 - RNA, 144 nt, synthetic construct
  misc_feature 1..144: note = Description of Artificial Sequence: Synthetic polynucleotide
  source 1..144: mol_type = other RNA
tctggctgtggtggggactggttttagagctagaaatagcaagttaaaataaggctagtccgttatcaacttgaaaaagtggcaccgagtcggtgcgccacgcccaaggggtgttcactgctggcctcggcagtccccaccaca

SEQ ID NO: 1236 - RNA, 144 nt, synthetic construct
  misc_feature 1..144: note = Description of Artificial Sequence: Synthetic polynucleotide
  source 1..144: mol_type = other RNA
tctggctgtggtggggactggttttagagctagaaatagcaagttaaaataaggctagtccgttatcaacttgaaaaagtggcaccgagtcggtgctgccacgcccaaggggtgttcactgctggcctctgcagtccccaccac

SEQ ID NO: 1237 - RNA, 144 nt, synthetic construct
  misc_feature 1..144: note = Description of Artificial Sequence: Synthetic polynucleotide
  source 1..144: mol_type = other RNA
tctggctgtggtggggactggttttagagctagaaatagcaagttaaaataaggctagtccgttatcaacttgaaaaagtggcaccgagtcggtgcactgccacgcccaaggggtgttcactgctggcctctgcagtccccacc

SEQ ID NO: 1238 - RNA, 144 nt, synthetic construct
  misc_feature 1..144: note = Description of Artificial Sequence: Synthetic polynucleotide
  source 1..144: mol_type = other RNA
gtctggctgtggtggggactggttttagagctagaaatagcaagttaaaataaggctagtccgttatcaacttgaaaaagtggcaccgagtcggtgcgcccaaggggtgttcactgctggcctctgcagtccccaccttttttt

SEQ ID NO: 1239 - RNA, 144 nt, synthetic construct
  misc_feature 1..144: note = Description of Artificial Sequence: Synthetic polynucleotide
  source 1..144: mol_type = other RNA
gtctggctgtggtggggactggttttagagctagaaatagcaagttaaaataaggctagtccgttatcaacttgaaaaagtggcaccgagtcggtgcggggtgttcactgctggcctcggcagtccccaccacagccttttttt

SEQ ID NO: 1240 - RNA, 144 nt, synthetic construct
  misc_feature 1..144: note = Description of Artificial Sequence: Synthetic polynucleotide
  source 1..144: mol_type = other RNA
tctggctgtggtggggactggttttagagctagaaatagcaagttaaaataaggctagtccgttatcaacttgaaaaagtggcaccgagtcggtgcacgcccaaggggtgttcactgctggcctcggcagtccccaccacagcc

SEQ ID NO: 1241 - RNA, 144 nt, synthetic construct
  misc_feature 1..144: note = Description of Artificial Sequence: Synthetic polynucleotide
  source 1..144: mol_type = other RNA
gtctggctgtggtggggactggttttagagctagaaatagcaagttaaaataaggctagtccgttatcaacttgaaaaagtggcaccgagtcggtgcgggtgttcactgctggcctcagcagtccccaccacagccagtttttt

SEQ ID NO: 1242 - RNA, 144 nt, synthetic construct
  misc_feature 1..144: note = Description of Artificial Sequence: Synthetic polynucleotide
  source 1..144: mol_type = other RNA
gtctggctgtggtggggactggttttagagctagaaatagcaagttaaaataaggctagtccgttatcaacttgaaaaagtggcaccgagtcggtgcgcccaaggggtgttcactgctggcctcggcagtccccaccttttttt

SEQ ID NO: 1243 - RNA, 144 nt, synthetic construct
  misc_feature 1..144: note = Description of Artificial Sequence: Synthetic polynucleotide
  source 1..144: mol_type = other RNA
gtctggctgtggtggggactggttttagagctagaaatagcaagttaaaataaggctagtccgttatcaacttgaaaaagtggcaccgagtcggtgcaggggtgttcactgctggcctcagcagtccccaccacagcctttttt

SEQ ID NO: 1244 - RNA, 144 nt, synthetic construct
  misc_feature 1..144: note = Description of Artificial Sequence: Synthetic polynucleotide
  source 1..144: mol_type = other RNA
tctggctgtggtggggactggttttagagctagaaatagcaagttaaaataaggctagtccgttatcaacttgaaaaagtggcaccgagtcggtgcacgcccaaggggtgttcactgctggcctccgcagtccccaccacagcc

SEQ ID NO: 1245 - RNA, 144 nt, synthetic construct
  misc_feature 1..144: note = Description of Artificial Sequence: Synthetic polynucleotide
  source 1..144: mol_type = other RNA
gtctggctgtggtggggactggttttagagctagaaatagcaagttaaaataaggctagtccgttatcaacttgaaaaagtggcaccgagtcggtgcggggtgttcactgctggcctcagcagtccccaccacagccttttttt

SEQ ID NO: 1246 - RNA, 144 nt, synthetic construct
  misc_feature 1..144: note = Description of Artificial Sequence: Synthetic polynucleotide
  source 1..144: mol_type = other RNA
gtctggctgtggtggggactggttttagagctagaaatagcaagttaaaataaggctagtccgttatcaacttgaaaaagtggcaccgagtcggtgcggggtgttcactgctggcctccgcagtccccaccacagccttttttt

SEQ ID NO: 1247 - RNA, 144 nt, synthetic construct
  misc_feature 1..144: note = Description of Artificial Sequence: Synthetic polynucleotide
  source 1..144: mol_type = other RNA
gtctggctgtggtggggactggttttagagctagaaatagcaagttaaaataaggctagtccgttatcaacttgaaaaagtggcaccgagtcggtgcaggggtgttcactgctggcctccgcagtccccaccacagcttttttt

SEQ ID NO: 1248 - RNA, 144 nt, synthetic construct
  misc_feature 1..144: note = Description of Artificial Sequence: Synthetic polynucleotide
  source 1..144: mol_type = other RNA
tctggctgtggtggggactggttttagagctagaaatagcaagttaaaataaggctagtccgttatcaacttgaaaaagtggcaccgagtcggtgcgccacgcccaaggggtgttcactgctggcctccgcagtccccaccaca

SEQ ID NO: 1249 - RNA, 144 nt, synthetic construct
  misc_feature 1..144: note = Description of Artificial Sequence: Synthetic polynucleotide
  source 1..144: mol_type = other RNA
gtctggctgtggtggggactggttttagagctagaaatagcaagttaaaataaggctagtccgttatcaacttgaaaaagtggcaccgagtcggtgcaggggtgttcactgctggcctccgcagtccccaccacagcctttttt

SEQ ID NO: 1250 - RNA, 144 nt, synthetic construct
  misc_feature 1..144: note = Description of Artificial Sequence: Synthetic polynucleotide
  source 1..144: mol_type = other RNA
gtctggctgtggtggggactggttttagagctagaaatagcaagttaaaataaggctagtccgttatcaacttgaaaaagtggcaccgagtcggtgcggggtgttcactgctggcctctgcagtccccaccacagccttttttt

SEQ ID NO: 1251 - RNA, 144 nt, synthetic construct
  misc_feature 1..144: note = Description of Artificial Sequence: Synthetic polynucleotide
  source 1..144: mol_type = other RNA
gtctggctgtggtggggactggttttagagctagaaatagcaagttaaaataaggctagtccgttatcaacttgaaaaagtggcaccgagtcggtgcgcccaaggggtgttcactgctggcctcagcagtccccaccttttttt

SEQ ID NO: 1252 - RNA, 144 nt, synthetic construct
  misc_feature 1..144: note = Description of Artificial Sequence: Synthetic polynucleotide
  source 1..144: mol_type = other RNA
gtctggctgtggtggggactggttttagagctagaaatagcaagttaaaataaggctagtccgttatcaacttgaaaaagtggcaccgagtcggtgcaggggtgttcactgctggcctctgcagtccccaccacagcctttttt

SEQ ID NO: 1253 - RNA, 144 nt, synthetic construct
  misc_feature 1..144: note = Description of Artificial Sequence: Synthetic polynucleotide
  source 1..144: mol_type = other RNA
gtctggctgtggtggggactggttttagagctagaaatagcaagttaaaataaggctagtccgttatcaacttgaaaaagtggcaccgagtcggtgcaggggtgttcactgctggcctcagcagtccccaccacagcttttttt

SEQ ID NO: 1254 - RNA, 144 nt, synthetic construct
  misc_feature 1..144: note = Description of Artificial Sequence: Synthetic polynucleotide
  source 1..144: mol_type = other RNA
gtctggctgtggtggggactggttttagagctagaaatagcaagttaaaataaggctagtccgttatcaacttgaaaaagtggcaccgagtcggtgcaaggggtgttcactgctggcctcggcagtccccaccacagttttttt

SEQ ID NO: 1255 - RNA, 144 nt, synthetic construct
  misc_feature 1..144: note = Description of Artificial Sequence: Synthetic polynucleotide
  source 1..144: mol_type = other RNA
gtctggctgtggtggggactggttttagagctagaaatagcaagttaaaataaggctagtccgttatcaacttgaaaaagtggcaccgagtcggtgcaggggtgttcactgctggcctcggcagtccccaccacagcttttttt

SEQ ID NO: 1256 - RNA, 144 nt, synthetic construct
  misc_feature 1..144: note = Description of Artificial Sequence: Synthetic polynucleotide
  source 1..144: mol_type = other RNA
gtctggctgtggtggggactggttttagagctagaaatagcaagttaaaataaggctagtccgttatcaacttgaaaaagtggcaccgagtcggtgcaaggggtgttcactgctggcctccgcagtccccaccacagttttttt

SEQ ID NO: 1257 - RNA, 144 nt, synthetic construct
  misc_feature 1..144: note = Description of Artificial Sequence: Synthetic polynucleotide
  source 1..144: mol_type = other RNA
gtctggctgtggtggggactggttttagagctagaaatagcaagttaaaataaggctagtccgttatcaacttgaaaaagtggcaccgagtcggtgcaggggtgttcactgctggcctctgcagtccccaccacagcttttttt

SEQ ID NO: 1258 - RNA, 144 nt, synthetic construct
  misc_feature 1..144: note = Description of Artificial Sequence: Synthetic polynucleotide
  source 1..144: mol_type = other RNA
gtctggctgtggtggggactggttttagagctagaaatagcaagttaaaataaggctagtccgttatcaacttgaaaaagtggcaccgagtcggtgcaaggggtgttcactgctggcctcagcagtccccaccacagttttttt

SEQ ID NO: 1259 - RNA, 144 nt, synthetic construct
  misc_feature 1..144: note = Description of Artificial Sequence: Synthetic polynucleotide
  source 1..144: mol_type = other RNA
gtctggctgtggtggggactggttttagagctagaaatagcaagttaaaataaggctagtccgttatcaacttgaaaaagtggcaccgagtcggtgcaggggtgttcactgctggcctcggcagtccccaccacagcctttttt

SEQ ID NO: 1260 - RNA, 144 nt, synthetic construct
  misc_feature 1..144: note = Description of Artificial Sequence: Synthetic polynucleotide
  source 1..144: mol_type = other RNA
gtctggctgtggtggggactggttttagagctagaaatagcaagttaaaataaggctagtccgttatcaacttgaaaaagtggcaccgagtcggtgcaaggggtgttcactgctggcctctgcagtccccaccacagttttttt

SEQ ID NO: 1261 - RNA, 144 nt, synthetic construct
  misc_feature 1..144: note = Description of Artificial Sequence: Synthetic polynucleotide
  source 1..144: mol_type = other RNA
tctggctgtggtggggactggttttagagctagaaatagcaagttaaaataaggctagtccgttatcaacttgaaaaagtggcaccgagtcggtgcgccacgcccaaggggtgttcactgctggcctcagcagtccccaccaca

SEQ ID NO: 1262 - RNA, 144 nt, synthetic construct
  misc_feature 1..144: note = Description of Artificial Sequence: Synthetic polynucleotide
  source 1..144: mol_type = other RNA
gtctggctgtggtggggactggttttagagctagaaatagcaagttaaaataaggctagtccgttatcaacttgaaaaagtggcaccgagtcggtgcgggtgttcactgctggcctcggcagtccccaccacagccagtttttt

SEQ ID NO: 1263 - RNA, 144 nt, synthetic construct
  misc_feature 1..144: note = Description of Artificial Sequence: Synthetic polynucleotide
  source 1..144: mol_type = other RNA
tctggctgtggtggggactggttttagagctagaaatagcaagttaaaataaggctagtccgttatcaacttgaaaaagtggcaccgagtcggtgcgccacgcccaaggggtgttcactgctggcctctgcagtccccaccaca

SEQ ID NO: 1264 - RNA, 144 nt, synthetic construct
  misc_feature 1..144: note = Description of Artificial Sequence: Synthetic polynucleotide
  source 1..144: mol_type = other RNA
tctggctgtggtggggactggttttagagctagaaatagcaagttaaaataaggctagtccgttatcaacttgaaaaagtggcaccgagtcggtgcacgcccaaggggtgttcactgctggcctcagcagtccccaccacagcc

SEQ ID NO: 1265 - RNA, 144 nt, synthetic construct
  misc_feature 1..144: note = Description of Artificial Sequence: Synthetic polynucleotide
  source 1..144: mol_type = other RNA
tctggctgtggtggggactggttttagagctagaaatagcaagttaaaataaggctagtccgttatcaacttgaaaaagtggcaccgagtcggtgctgccacgcccaaggggtgttcactgctggcctccgcagtccccaccac

SEQ ID NO: 1266 - RNA, 144 nt, synthetic construct
  misc_feature 1..144: note = Description of Artificial Sequence: Synthetic polynucleotide
  source 1..144: mol_type = other RNA
tctggctgtggtggggactggttttagagctagaaatagcaagttaaaataaggctagtccgttatcaacttgaaaaagtggcaccgagtcggtgcactgccacgcccaaggggtgttcactgctggcctcggcagtccccacc

SEQ ID NO: 1267 - RNA, 144 nt, synthetic construct
  misc_feature 1..144: note = Description of Artificial Sequence: Synthetic polynucleotide
  source 1..144: mol_type = other RNA
tctggctgtggtggggactggttttagagctagaaatagcaagttaaaataaggctagtccgttatcaacttgaaaaagtggcaccgagtcggtgcactgccacgcccaaggggtgttcactgctggcctccgcagtccccacc

SEQ ID NO: 1268 - RNA, 144 nt, synthetic construct
  misc_feature 1..144: note = Description of Artificial Sequence: Synthetic polynucleotide
  source 1..144: mol_type = other RNA
tctggctgtggtggggactggttttagagctagaaatagcaagttaaaataaggctagtccgttatcaacttgaaaaagtggcaccgagtcggtgcactgccacgcccaaggggtgttcactgctggcctcagcagtccccacc

SEQ ID NO: 1269 - RNA, 145 nt, synthetic construct
  misc_feature 1..145: note = Description of Artificial Sequence: Synthetic polynucleotide
  source 1..145: mol_type = other RNA
tctggctgtggtggggactggttttagagctagaaatagcaagttaaaataaggctagtccgttatcaacttgaaaaagtggcaccgagtcggtgctgccacgcccaaggggtgttcactgctggcctccgcagtccccaccaca

SEQ ID NO: 1270 - RNA, 145 nt, synthetic construct
  misc_feature 1..145: note = Description of Artificial Sequence: Synthetic polynucleotide
  source 1..145: mol_type = other RNA
tctggctgtggtggggactggttttagagctagaaatagcaagttaaaataaggctagtccgttatcaacttgaaaaagtggcaccgagtcggtgcgccacgcccaaggggtgttcactgctggcctccgcagtccccaccacag

SEQ ID NO: 1271 - RNA, 145 nt, synthetic construct
  misc_feature 1..145: note = Description of Artificial Sequence: Synthetic polynucleotide
  source 1..145: mol_type = other RNA
gtctggctgtggtggggactggttttagagctagaaatagcaagttaaaataaggctagtccgttatcaacttgaaaaagtggcaccgagtcggtgcaaggggtgttcactgctggcctctgcagtccccaccacagcctttttt

SEQ ID NO: 1272 - RNA, 145 nt, synthetic construct
  misc_feature 1..145: note = Description of Artificial Sequence: Synthetic polynucleotide
  source 1..145: mol_type = other RNA
tctggctgtggtggggactggttttagagctagaaatagcaagttaaaataaggctagtccgttatcaacttgaaaaagtggcaccgagtcggtgctgccacgcccaaggggtgttcactgctggcctctgcagtccccaccaca

SEQ ID NO: 1273 - RNA, 145 nt, synthetic construct
  misc_feature 1..145: note = Description of Artificial Sequence: Synthetic polynucleotide
  source 1..145: mol_type = other RNA
tctggctgtggtggggactggttttagagctagaaatagcaagttaaaataaggctagtccgttatcaacttgaaaaagtggcaccgagtcggtgcgccacgcccaaggggtgttcactgctggcctctgcagtccccaccacag

SEQ ID NO: 1274 - RNA, 145 nt, synthetic construct
  misc_feature 1..145: note = Description of Artificial Sequence: Synthetic polynucleotide
  source 1..145: mol_type = other RNA
gtctggctgtggtggggactggttttagagctagaaatagcaagttaaaataaggctagtccgttatcaacttgaaaaagtggcaccgagtcggtgcacgcccaaggggtgttcactgctggcctctgcagtccccacttttttt

SEQ ID NO: 1275 - RNA, 145 nt, synthetic construct
  misc_feature 1..145: note = Description of Artificial Sequence: Synthetic polynucleotide
  source 1..145: mol_type = other RNA
gtctggctgtggtggggactggttttagagctagaaatagcaagttaaaataaggctagtccgttatcaacttgaaaaagtggcaccgagtcggtgcacgcccaaggggtgttcactgctggcctcggcagtccccacttttttt

SEQ ID NO: 1276 - RNA, 145 nt, synthetic construct
  misc_feature 1..145: note = Description of Artificial Sequence: Synthetic polynucleotide
  source 1..145: mol_type = other RNA
gtctggctgtggtggggactggttttagagctagaaatagcaagttaaaataaggctagtccgttatcaacttgaaaaagtggcaccgagtcggtgcaggggtgttcactgctggcctcggcagtccccaccacagccttttttt

SEQ ID NO: 1277 - RNA, 145 nt, synthetic construct
  misc_feature 1..145: note = Description of Artificial Sequence: Synthetic polynucleotide
  source 1..145: mol_type = other RNA
gtctggctgtggtggggactggttttagagctagaaatagcaagttaaaataaggctagtccgttatcaacttgaaaaagtggcaccgagtcggtgcacgcccaaggggtgttcactgctggcctcagcagtccccacttttttt

SEQ ID NO: 1278 - RNA, 145 nt, synthetic construct
  misc_feature 1..145: note = Description of Artificial Sequence: Synthetic polynucleotide
  source 1..145: mol_type = other RNA
tctggctgtggtggggactggttttagagctagaaatagcaagttaaaataaggctagtccgttatcaacttgaaaaagtggcaccgagtcggtgctgccacgcccaaggggtgttcactgctggcctcagcagtccccaccaca

SEQ ID NO: 1279 - RNA, 145 nt, synthetic construct
  misc_feature 1..145: note = Description of Artificial Sequence: Synthetic polynucleotide
  source 1..145: mol_type = other RNA
gtctggctgtggtggggactggttttagagctagaaatagcaagttaaaataaggctagtccgttatcaacttgaaaaagtggcaccgagtcggtgcgcccaaggggtgttcactgctggcctccgcagtccccaccattttttt

SEQ ID NO: 1280 - RNA, 145 nt, synthetic construct
  misc_feature 1..145: note = Description of Artificial Sequence: Synthetic polynucleotide
  source 1..145: mol_type = other RNA
gtctggctgtggtggggactggttttagagctagaaatagcaagttaaaataaggctagtccgttatcaacttgaaaaagtggcaccgagtcggtgcaaggggtgttcactgctggcctcggcagtccccaccacagcctttttt

SEQ ID NO: 1281 - RNA, 145 nt, synthetic construct
  misc_feature 1..145: note = Description of Artificial Sequence: Synthetic polynucleotide
  source 1..145: mol_type = other RNA
gtctggctgtggtggggactggttttagagctagaaatagcaagttaaaataaggctagtccgttatcaacttgaaaaagtggcaccgagtcggtgcacgcccaaggggtgttcactgctggcctccgcagtccccacttttttt

SEQ ID NO: 1282 - RNA, 145 nt, synthetic construct
  misc_feature 1..145: note = Description of Artificial Sequence: Synthetic polynucleotide
  source 1..145: mol_type = other RNA
tctggctgtggtggggactggttttagagctagaaatagcaagttaaaataaggctagtccgttatcaacttgaaaaagtggcaccgagtcggtgcgccacgcccaaggggtgttcactgctggcctcagcagtccccaccacag

SEQ ID NO: 1283 - RNA, 145 nt, synthetic construct
  misc_feature 1..145: note = Description of Artificial Sequence: Synthetic polynucleotide
  source 1..145: mol_type = other RNA
gtctggctgtggtggggactggttttagagctagaaatagcaagttaaaataaggctagtccgttatcaacttgaaaaagtggcaccgagtcggtgcaaggggtgttcactgctggcctccgcagtccccaccacagcctttttt

SEQ ID NO: 1284 - RNA, 145 nt, synthetic construct
  misc_feature 1..145: note = Description of Artificial Sequence: Synthetic polynucleotide
  source 1..145: mol_type = other RNA
gtctggctgtggtggggactggttttagagctagaaatagcaagttaaaataaggctagtccgttatcaacttgaaaaagtggcaccgagtcggtgcggggtgttcactgctggcctcggcagtccccaccacagccagtttttt

SEQ ID NO: 1285 - RNA, 145 nt, synthetic construct
  misc_feature 1..145: note = Description of Artificial Sequence: Synthetic polynucleotide
  source 1..145: mol_type = other RNA
tctggctgtggtggggactggttttagagctagaaatagcaagttaaaataaggctagtccgttatcaacttgaaaaagtggcaccgagtcggtgctgccacgcccaaggggtgttcactgctggcctcggcagtccccaccaca

SEQ ID NO: 1286 - RNA, 145 nt, synthetic construct
  misc_feature 1..145: note = Description of Artificial Sequence: Synthetic polynucleotide
  source 1..145: mol_type = other RNA
gtctggctgtggtggggactggttttagagctagaaatagcaagttaaaataaggctagtccgttatcaacttgaaaaagtggcaccgagtcggtgcaaggggtgttcactgctggcctccgcagtccccaccacagcttttttt

SEQ ID NO: 1287 - RNA, 145 nt, synthetic construct
  misc_feature 1..145: note = Description of Artificial Sequence: Synthetic polynucleotide
  source 1..145: mol_type = other RNA
gtctggctgtggtggggactggttttagagctagaaatagcaagttaaaataaggctagtccgttatcaacttgaaaaagtggcaccgagtcggtgcaggggtgttcactgctggcctccgcagtccccaccacagccttttttt

SEQ ID NO: 1288 - RNA, 145 nt, synthetic construct
  misc_feature 1..145: note = Description of Artificial Sequence: Synthetic polynucleotide
  source 1..145: mol_type = other RNA
gtctggctgtggtggggactggttttagagctagaaatagcaagttaaaataaggctagtccgttatcaacttgaaaaagtggcaccgagtcggtgcggggtgttcactgctggcctcagcagtccccaccacagccagtttttt

SEQ ID NO: 1289 - RNA, 145 nt, synthetic construct
  misc_feature 1..145: note = Description of Artificial Sequence: Synthetic polynucleotide
  source 1..145: mol_type = other RNA
tctggctgtggtggggactggttttagagctagaaatagcaagttaaaataaggctagtccgttatcaacttgaaaaagtggcaccgagtcggtgcactgccacgcccaaggggtgttcactgctggcctccgcagtccccacca

SEQ ID NO: 1290 - RNA, 145 nt, synthetic construct
  misc_feature 1..145: note = Description of Artificial Sequence: Synthetic polynucleotide
  source 1..145: mol_type = other RNA
gtctggctgtggtggggactggttttagagctagaaatagcaagttaaaataaggctagtccgttatcaacttgaaaaagtggcaccgagtcggtgcaaggggtgttcactgctggcctcagcagtccccaccacagcctttttt

SEQ ID NO: 1291 - RNA, 145 nt, synthetic construct
  misc_feature 1..145: note = Description of Artificial Sequence: Synthetic polynucleotide
  source 1..145: mol_type = other RNA
gtctggctgtggtggggactggttttagagctagaaatagcaagttaaaataaggctagtccgttatcaacttgaaaaagtggcaccgagtcggtgcaaggggtgttcactgctggcctcggcagtccccaccacagcttttttt

SEQ ID NO: 1292 - RNA, 145 nt, synthetic construct
  misc_feature 1..145: note = Description of Artificial Sequence: Synthetic polynucleotide
  source 1..145: mol_type = other RNA
tctggctgtggtggggactggttttagagctagaaatagcaagttaaaataaggctagtccgttatcaacttgaaaaagtggcaccgagtcggtgcactgccacgcccaaggggtgttcactgctggcctcagcagtccccacca

SEQ ID NO: 1293 - RNA, 145 nt, synthetic construct
  misc_feature 1..145: note = Description of Artificial Sequence: Synthetic polynucleotide
  source 1..145: mol_type = other RNA
gtctggctgtggtggggactggttttagagctagaaatagcaagttaaaataaggctagtccgttatcaacttgaaaaagtggcaccgagtcggtgcgcccaaggggtgttcactgctggcctcggcagtccccaccattttttt

SEQ ID NO: 1294 - RNA, 145 nt, synthetic construct
  misc_feature 1..145: note = Description of Artificial Sequence: Synthetic polynucleotide
  source 1..145: mol_type = other RNA
tctggctgtggtggggactggttttagagctagaaatagcaagttaaaataaggctagtccgttatcaacttgaaaaagtggcaccgagtcggtgcgccacgcccaaggggtgttcactgctggcctcggcagtccccaccacag

SEQ ID NO: 1295 - RNA, 145 nt, synthetic construct
  misc_feature 1..145: note = Description of Artificial Sequence: Synthetic polynucleotide
  source 1..145: mol_type = other RNA
gtctggctgtggtggggactggttttagagctagaaatagcaagttaaaataaggctagtccgttatcaacttgaaaaagtggcaccgagtcggtgcaggggtgttcactgctggcctcagcagtccccaccacagccttttttt

SEQ ID NO: 1296 - RNA, 145 nt, synthetic construct
  misc_feature 1..145: note = Description of Artificial Sequence: Synthetic polynucleotide
  source 1..145: mol_type = other RNA
gtctggctgtggtggggactggttttagagctagaaatagcaagttaaaataaggctagtccgttatcaacttgaaaaagtggcaccgagtcggtgcaaggggtgttcactgctggcctcagcagtccccaccacagcttttttt

SEQ ID NO: 1297 - RNA, 145 nt, synthetic construct
  misc_feature 1..145: note = Description of Artificial Sequence: Synthetic polynucleotide
  source 1..145: mol_type = other RNA
tctggctgtggtggggactggttttagagctagaaatagcaagttaaaataaggctagtccgttatcaacttgaaaaagtggcaccgagtcggtgcactgccacgcccaaggggtgttcactgctggcctcggcagtccccacca

SEQ ID NO: 1298 - RNA, 145 nt, synthetic construct
  misc_feature 1..145: note = Description of Artificial Sequence: Synthetic polynucleotide
  source 1..145: mol_type = other RNA
gtctggctgtggtggggactggttttagagctagaaatagcaagttaaaataaggctagtccgttatcaacttgaaaaagtggcaccgagtcggtgcaggggtgttcactgctggcctctgcagtccccaccacagccttttttt

SEQ ID NO: 1299 - RNA, 145 nt, synthetic construct
  misc_feature 1..145: note = Description of Artificial Sequence: Synthetic polynucleotide
  source 1..145: mol_type = other RNA
tctggctgtggtggggactggttttagagctagaaatagcaagttaaaataaggctagtccgttatcaacttgaaaaagtggcaccgagtcggtgcactgccacgcccaaggggtgttcactgctggcctctgcagtccccacca

SEQ ID NO: 1300 - RNA, 145 nt, synthetic construct
  misc_feature 1..145: note = Description of Artificial Sequence: Synthetic polynucleotide
  source 1..145: mol_type = other RNA
gtctggctgtggtggggactggttttagagctagaaatagcaagttaaaataaggctagtccgttatcaacttgaaaaagtggcaccgagtcggtgcaaggggtgttcactgctggcctctgcagtccccaccacagcttttttt

SEQ ID NO: 1301 - RNA, 145 nt, synthetic construct
  misc_feature 1..145: note = Description of Artificial Sequence: Synthetic polynucleotide
  source 1..145: mol_type = other RNA
gtctggctgtggtggggactggttttagagctagaaatagcaagttaaaataaggctagtccgttatcaacttgaaaaagtggcaccgagtcggtgcggggtgttcactgctggcctctgcagtccccaccacagccagtttttt

SEQ ID NO: 1302 - RNA, 145 nt, synthetic construct
  misc_feature 1..145: note = Description of Artificial Sequence: Synthetic polynucleotide
  source 1..145: mol_type = other RNA
gtctggctgtggtggggactggttttagagctagaaatagcaagttaaaataaggctagtccgttatcaacttgaaaaagtggcaccgagtcggtgcgcccaaggggtgttcactgctggcctcagcagtccccaccattttttt

SEQ ID NO: 1303 - RNA, 145 nt, synthetic construct
  misc_feature 1..145: note = Description of Artificial Sequence: Synthetic polynucleotide
  source 1..145: mol_type = other RNA
gtctggctgtggtggggactggttttagagctagaaatagcaagttaaaataaggctagtccgttatcaacttgaaaaagtggcaccgagtcggtgcgcccaaggggtgttcactgctggcctctgcagtccccaccattttttt

SEQ ID NO: 1304 - RNA, 145 nt, synthetic construct
  misc_feature 1..145: note = Description of Artificial Sequence: Synthetic polynucleotide
  source 1..145: mol_type = other RNA
gtctggctgtggtggggactggttttagagctagaaatagcaagttaaaataaggctagtccgttatcaacttgaaaaagtggcaccgagtcggtgcggggtgttcactgctggcctccgcagtccccaccacagccagtttttt

SEQ ID NO: 1305 - RNA, 146 nt, synthetic construct
  misc_feature 1..146: note = Description of Artificial Sequence: Synthetic polynucleotide
  source 1..146: mol_type = other RNA
tctggctgtggtggggactggttttagagctagaaatagcaagttaaaataaggctagtccgttatcaacttgaaaaagtggcaccgagtcggtgcgccacgcccaaggggtgttcactgctggcctctgcagtccccaccacagc

SEQ ID NO: 1306 - RNA, 146 nt, synthetic construct
  misc_feature 1..146: note = Description of Artificial Sequence: Synthetic polynucleotide
  source 1..146: mol_type = other RNA
gtctggctgtggtggggactggttttagagctagaaatagcaagttaaaataaggctagtccgttatcaacttgaaaaagtggcaccgagtcggtgcgcccaaggggtgttcactgctggcctccgcagtccccaccacttttttt

SEQ ID NO: 1307 - RNA, 146 nt, synthetic construct
  misc_feature 1..146: note = Description of Artificial Sequence: Synthetic polynucleotide
  source 1..146: mol_type = other RNA
gtctggctgtggtggggactggttttagagctagaaatagcaagttaaaataaggctagtccgttatcaacttgaaaaagtggcaccgagtcggtgcacgcccaaggggtgttcactgctggcctccgcagtccccaccttttttt

SEQ ID NO: 1308 - RNA, 146 nt, synthetic construct
  misc_feature 1..146: note = Description of Artificial Sequence: Synthetic polynucleotide
  source 1..146: mol_type = other RNA
gtctggctgtggtggggactggttttagagctagaaatagcaagttaaaataaggctagtccgttatcaacttgaaaaagtggcaccgagtcggtgcacgcccaaggggtgttcactgctggcctcagcagtccccaccttttttt

SEQ ID NO: 1309 - RNA, 146 nt, synthetic construct
  misc_feature 1..146: note = Description of Artificial Sequence: Synthetic polynucleotide
  source 1..146: mol_type = other RNA
tctggctgtggtggggactggttttagagctagaaatagcaagttaaaataaggctagtccgttatcaacttgaaaaagtggcaccgagtcggtgctgccacgcccaaggggtgttcactgctggcctccgcagtccccaccacag

SEQ ID NO: 1310 - RNA, 146 nt, synthetic construct
  misc_feature 1..146: note = Description of Artificial Sequence: Synthetic polynucleotide
  source 1..146: mol_type = other RNA
tctggctgtggtggggactggttttagagctagaaatagcaagttaaaataaggctagtccgttatcaacttgaaaaagtggcaccgagtcggtgcactgccacgcccaaggggtgttcactgctggcctctgcagtccccaccac

SEQ ID NO: 1311 - RNA, 146 nt, synthetic construct
  misc_feature 1..146: note = Description of Artificial Sequence: Synthetic polynucleotide
  source 1..146: mol_type = other RNA
tctggctgtggtggggactggttttagagctagaaatagcaagttaaaataaggctagtccgttatcaacttgaaaaagtggcaccgagtcggtgcactgccacgcccaaggggtgttcactgctggcctcagcagtccccaccac

SEQ ID NO: 1312 - RNA, 146 nt, synthetic construct
  misc_feature 1..146: note = Description of Artificial Sequence: Synthetic polynucleotide
  source 1..146: mol_type = other RNA
gtctggctgtggtggggactggttttagagctagaaatagcaagttaaaataaggctagtccgttatcaacttgaaaaagtggcaccgagtcggtgcacgcccaaggggtgttcactgctggcctctgcagtccccaccttttttt

SEQ ID NO: 1313 - RNA, 146 nt, synthetic construct
  misc_feature 1..146: note = Description of Artificial Sequence: Synthetic polynucleotide
  source 1..146: mol_type = other RNA
tctggctgtggtggggactggttttagagctagaaatagcaagttaaaataaggctagtccgttatcaacttgaaaaagtggcaccgagtcggtgcgccacgcccaaggggtgttcactgctggcctcggcagtccccaccacagc

SEQ ID NO: 1314 - RNA, 146 nt, synthetic construct
  misc_feature 1..146: note = Description of Artificial Sequence: Synthetic polynucleotide
  source 1..146: mol_type = other RNA
tctggctgtggtggggactggttttagagctagaaatagcaagttaaaataaggctagtccgttatcaacttgaaaaagtggcaccgagtcggtgcgccacgcccaaggggtgttcactgctggcctcagcagtccccaccacagc

SEQ ID NO: 1315 - RNA, 146 nt, synthetic construct
  misc_feature 1..146: note = Description of Artificial Sequence: Synthetic polynucleotide
  source 1..146: mol_type = other RNA
tctggctgtggtggggactggttttagagctagaaatagcaagttaaaataaggctagtccgttatcaacttgaaaaagtggcaccgagtcggtgcgccacgcccaaggggtgttcactgctggcctccgcagtccccaccacagc

SEQ ID NO: 1316 - RNA, 146 nt, synthetic construct
  misc_feature 1..146: note = Description of Artificial Sequence: Synthetic polynucleotide
  source 1..146: mol_type = other RNA
tctggctgtggtggggactggttttagagctagaaatagcaagttaaaataaggctagtccgttatcaacttgaaaaagtggcaccgagtcggtgctgccacgcccaaggggtgttcactgctggcctctgcagtccccaccacag

SEQ ID NO: 1317 - RNA, 146 nt, synthetic construct
  misc_feature 1..146: note = Description of Artificial Sequence: Synthetic polynucleotide
  source 1..146: mol_type = other RNA
tctggctgtggtggggactggttttagagctagaaatagcaagttaaaataaggctagtccgttatcaacttgaaaaagtggcaccgagtcggtgctgccacgcccaaggggtgttcactgctggcctcggcagtccccaccacag

SEQ ID NO: 1318 - RNA, 146 nt, synthetic construct
  misc_feature 1..146: note = Description of Artificial Sequence: Synthetic polynucleotide
  source 1..146: mol_type = other RNA
tctggctgtggtggggactggttttagagctagaaatagcaagttaaaataaggctagtccgttatcaacttgaaaaagtggcaccgagtcggtgctgccacgcccaaggggtgttcactgctggcctcagcagtccccaccacag

SEQ ID NO: 1319 - RNA, 146 nt, synthetic construct
  misc_feature 1..146: note = Description of Artificial Sequence: Synthetic polynucleotide
  source 1..146: mol_type = other RNA
tctggctgtggtggggactggttttagagctagaaatagcaagttaaaataaggctagtccgttatcaacttgaaaaagtggcaccgagtcggtgcactgccacgcccaaggggtgttcactgctggcctccgcagtccccaccac

SEQ ID NO: 1320 - RNA, 146 nt, synthetic construct
  misc_feature 1..146: note = Description of Artificial Sequence: Synthetic polynucleotide
  source 1..146: mol_type = other RNA
gtctggctgtggtggggactggttttagagctagaaatagcaagttaaaataaggctagtccgttatcaacttgaaaaagtggcaccgagtcggtgcaggggtgttcactgctggcctcagcagtccccaccacagccagtttttt

SEQ ID NO: 1321 - RNA, 146 nt, synthetic construct
  misc_feature 1..146: note = Description of Artificial Sequence: Synthetic polynucleotide
  source 1..146: mol_type = other RNA
gtctggctgtggtggggactggttttagagctagaaatagcaagttaaaataaggctagtccgttatcaacttgaaaaagtggcaccgagtcggtgcaaggggtgttcactgctggcctctgcagtccccaccacagccttttttt

SEQ ID NO: 1322 - RNA, 146 nt, synthetic construct
  misc_feature 1..146: note = Description of Artificial Sequence: Synthetic polynucleotide
  source 1..146: mol_type = other RNA
gtctggctgtggtggggactggttttagagctagaaatagcaagttaaaataaggctagtccgttatcaacttgaaaaagtggcaccgagtcggtgcgcccaaggggtgttcactgctggcctcagcagtccccaccacttttttt

SEQ ID NO: 1323 - RNA, 146 nt, synthetic construct
  misc_feature 1..146: note = Description of Artificial Sequence: Synthetic polynucleotide
  source 1..146: mol_type = other RNA
gtctggctgtggtggggactggttttagagctagaaatagcaagttaaaataaggctagtccgttatcaacttgaaaaagtggcaccgagtcggtgcgcccaaggggtgttcactgctggcctcggcagtccccaccacttttttt

SEQ ID NO: 1324 - RNA, 146 nt, synthetic construct
  misc_feature 1..146: note = Description of Artificial Sequence: Synthetic polynucleotide
  source 1..146: mol_type = other RNA
gtctggctgtggtggggactggttttagagctagaaatagcaagttaaaataaggctagtccgttatcaacttgaaaaagtggcaccgagtcggtgcaggggtgttcactgctggcctccgcagtccccaccacagccagtttttt

SEQ ID NO: 1325 - RNA, 146 nt, synthetic construct
  misc_feature 1..146: note = Description of Artificial Sequence: Synthetic polynucleotide
  source 1..146: mol_type = other RNA
gtctggctgtggtggggactggttttagagctagaaatagcaagttaaaataaggctagtccgttatcaacttgaaaaagtggcaccgagtcggtgcaggggtgttcactgctggcctctgcagtccccaccacagccagtttttt

SEQ ID NO: 1326 - RNA, 146 nt, synthetic construct
  misc_feature 1..146: note = Description of Artificial Sequence: Synthetic polynucleotide
  source 1..146: mol_type = other RNA
gtctggctgtggtggggactggttttagagctagaaatagcaagttaaaataaggctagtccgttatcaacttgaaaaagtggcaccgagtcggtgcgcccaaggggtgttcactgctggcctctgcagtccccaccacttttttt

SEQ ID NO: 1327 - RNA, 146 nt, synthetic construct
  misc_feature 1..146: note = Description of Artificial Sequence: Synthetic polynucleotide
  source 1..146: mol_type = other RNA
gtctggctgtggtggggactggttttagagctagaaatagcaagttaaaataaggctagtccgttatcaacttgaaaaagtggcaccgagtcggtgcaaggggtgttcactgctggcctcagcagtccccaccacagccttttttt

SEQ ID NO: 1328 - RNA, 146 nt, synthetic construct
  misc_feature 1..146: note = Description of Artificial Sequence: Synthetic polynucleotide
  source 1..146: mol_type = other RNA
gtctggctgtggtggggactggttttagagctagaaatagcaagttaaaataaggctagtccgttatcaacttgaaaaagtggcaccgagtcggtgcaaggggtgttcactgctggcctcggcagtccccaccacagccttttttt

SEQ ID NO: 1329 - RNA, 146 nt, synthetic construct
  misc_feature 1..146: note = Description of Artificial Sequence: Synthetic polynucleotide
  source 1..146: mol_type = other RNA
tctggctgtggtggggactggttttagagctagaaatagcaagttaaaataaggctagtccgttatcaacttgaaaaagtggcaccgagtcggtgcactgccacgcccaaggggtgttcactgctggcctcggcagtccccaccac

SEQ ID NO: 1330 - RNA, 146 nt, synthetic construct
  misc_feature 1..146: note = Description of Artificial Sequence: Synthetic polynucleotide
  source 1..146: mol_type = other RNA
gtctggctgtggtggggactggttttagagctagaaatagcaagttaaaataaggctagtccgttatcaacttgaaaaagtggcaccgagtcggtgcacgcccaaggggtgttcactgctggcctcggcagtccccaccttttttt

SEQ ID NO: 1331 - RNA, 146 nt, synthetic construct
  misc_feature 1..146: note = Description of Artificial Sequence: Synthetic polynucleotide
  source 1..146: mol_type = other RNA
gtctggctgtggtggggactggttttagagctagaaatagcaagttaaaataaggctagtccgttatcaacttgaaaaagtggcaccgagtcggtgcaggggtgttcactgctggcctcggcagtccccaccacagccagtttttt

SEQ ID NO: 1332 - RNA, 146 nt, synthetic construct
  misc_feature 1..146: note = Description of Artificial Sequence: Synthetic polynucleotide
  source 1..146: mol_type = other RNA
gtctggctgtggtggggactggttttagagctagaaatagcaagttaaaataaggctagtccgttatcaacttgaaaaagtggcaccgagtcggtgcaaggggtgttcactgctggcctccgcagtccccaccacagccttttttt

SEQ ID NO: 1333 - RNA, 147 nt, synthetic construct
  misc_feature 1..147: note = Description of Artificial Sequence: Synthetic polynucleotide
  source 1..147: mol_type = other RNA
tctggctgtggtggggactggttttagagctagaaatagcaagttaaaataaggctagtccgttatcaacttgaaaaagtggcaccgagtcggtgcactgccacgcccaaggggtgttcactgctggcctcagcagtccccaccaca

SEQ ID NO: 1334 - RNA, 147 nt, synthetic construct
  misc_feature 1..147: note = Description of Artificial Sequence: Synthetic polynucleotide
  source 1..147: mol_type = other RNA
tctggctgtggtggggactggttttagagctagaaatagcaagttaaaataaggctagtccgttatcaacttgaaaaagtggcaccgagtcggtgctgccacgcccaaggggtgttcactgctggcctcggcagtccccaccacagc

SEQ ID NO: 1335 - RNA, 147 nt, synthetic construct
  misc_feature 1..147: note = Description of Artificial Sequence: Synthetic polynucleotide
  source 1..147: mol_type = other RNA
gtctggctgtggtggggactggttttagagctagaaatagcaagttaaaataaggctagtccgttatcaacttgaaaaagtggcaccgagtcggtgcaaggggtgttcactgctggcctctgcagtccccaccacagccagtttttt

SEQ ID NO: 1336 - RNA, 147 nt, synthetic construct
  misc_feature 1..147: note = Description of Artificial Sequence: Synthetic polynucleotide
  source 1..147: mol_type = other RNA
gtctggctgtggtggggactggttttagagctagaaatagcaagttaaaataaggctagtccgttatcaacttgaaaaagtggcaccgagtcggtgcacgcccaaggggtgttcactgctggcctcagcagtccccaccattttttt

SEQ ID NO: 1337 - RNA, 147 nt, synthetic construct
  misc_feature 1..147: note = Description of Artificial Sequence: Synthetic polynucleotide
  source 1..147: mol_type = other RNA
gtctggctgtggtggggactggttttagagctagaaatagcaagttaaaataaggctagtccgttatcaacttgaaaaagtggcaccgagtcggtgcacgcccaaggggtgttcactgctggcctccgcagtccccaccattttttt

SEQ ID NO: 1338 - RNA, 147 nt, synthetic construct
  misc_feature 1..147: note = Description of Artificial Sequence: Synthetic polynucleotide
  source 1..147: mol_type = other RNA
tctggctgtggtggggactggttttagagctagaaatagcaagttaaaataaggctagtccgttatcaacttgaaaaagtggcaccgagtcggtgctgccacgcccaaggggtgttcactgctggcctcagcagtccccaccacagc

SEQ ID NO: 1339 - RNA, 147 nt, synthetic construct
  misc_feature 1..147: note = Description of Artificial Sequence: Synthetic polynucleotide
  source 1..147: mol_type = other RNA
gtctggctgtggtggggactggttttagagctagaaatagcaagttaaaataaggctagtccgttatcaacttgaaaaagtggcaccgagtcggtgcacgcccaaggggtgttcactgctggcctcggcagtccccaccattttttt

SEQ ID NO: 1340 - RNA, 147 nt, synthetic construct
  misc_feature 1..147: note = Description of Artificial Sequence: Synthetic polynucleotide
  source 1..147: mol_type = other RNA
tctggctgtggtggggactggttttagagctagaaatagcaagttaaaataaggctagtccgttatcaacttgaaaaagtggcaccgagtcggtgctgccacgcccaaggggtgttcactgctggcctccgcagtccccaccacagc

SEQ ID NO: 1341 - RNA, 147 nt, synthetic construct
  misc_feature 1..147: note = Description of Artificial Sequence: Synthetic polynucleotide
  source 1..147: mol_type = other RNA
gtctggctgtggtggggactggttttagagctagaaatagcaagttaaaataaggctagtccgttatcaacttgaaaaagtggcaccgagtcggtgcacgcccaaggggtgttcactgctggcctctgcagtccccaccattttttt

SEQ ID NO: 1342 - RNA, 147 nt, synthetic construct
  misc_feature 1..147: note = Description of Artificial Sequence: Synthetic polynucleotide
  source 1..147: mol_type = other RNA
tctggctgtggtggggactggttttagagctagaaatagcaagttaaaataaggctagtccgttatcaacttgaaaaagtggcaccgagtcggtgcgccacgcccaaggggtgttcactgctggcctccgcagtccccaccacagcc

SEQ ID NO: 1343 - RNA, 147 nt, synthetic construct
  misc_feature 1..147: note = Description of Artificial Sequence: Synthetic polynucleotide
  source 1..147: mol_type = other RNA
gtctggctgtggtggggactggttttagagctagaaatagcaagttaaaataaggctagtccgttatcaacttgaaaaagtggcaccgagtcggtgcgcccaaggggtgttcactgctggcctcagcagtccccaccacattttttt

SEQ ID NO: 1344 - RNA, 147 nt, synthetic construct
  misc_feature 1..147: note = Description of Artificial Sequence: Synthetic polynucleotide
  source 1..147: mol_type = other RNA
tctggctgtggtggggactggttttagagctagaaatagcaagttaaaataaggctagtccgttatcaacttgaaaaagtggcaccgagtcggtgcgccacgcccaaggggtgttcactgctggcctcggcagtccccaccacagcc

SEQ ID NO: 1345 - RNA, 147 nt, synthetic construct
  misc_feature 1..147: note = Description of Artificial Sequence: Synthetic polynucleotide
  source 1..147: mol_type = other RNA
tctggctgtggtggggactggttttagagctagaaatagcaagttaaaataaggctagtccgttatcaacttgaaaaagtggcaccgagtcggtgcactgccacgcccaaggggtgttcactgctggcctccgcagtccccaccaca

SEQ ID NO: 1346 - RNA, 147 nt, synthetic construct
  misc_feature 1..147: note = Description of Artificial Sequence: Synthetic polynucleotide
  source 1..147: mol_type = other RNA
tctggctgtggtggggactggttttagagctagaaatagcaagttaaaataaggctagtccgttatcaacttgaaaaagtggcaccgagtcggtgctgccacgcccaaggggtgttcactgctggcctctgcagtccccaccacagc

SEQ ID NO: 1347 - RNA, 147 nt, synthetic construct
  misc_feature 1..147: note = Description of Artificial Sequence: Synthetic polynucleotide
  source 1..147: mol_type = other RNA
tctggctgtggtggggactggttttagagctagaaatagcaagttaaaataaggctagtccgttatcaacttgaaaaagtggcaccgagtcggtgcgccacgcccaaggggtgttcactgctggcctcagcagtccccaccacagcc

SEQ ID NO: 1348 - RNA, 147 nt, synthetic construct
  misc_feature 1..147: note = Description of Artificial Sequence: Synthetic polynucleotide
  source 1..147: mol_type = other RNA
tctggctgtggtggggactggttttagagctagaaatagcaagttaaaataaggctagtccgttatcaacttgaaaaagtggcaccgagtcggtgcactgccacgcccaaggggtgttcactgctggcctctgcagtccccaccaca

SEQ ID NO: 1349 - RNA, 147 nt, synthetic construct
  misc_feature 1..147: note = Description of Artificial Sequence: Synthetic polynucleotide
  source 1..147: mol_type = other RNA
gtctggctgtggtggggactggttttagagctagaaatagcaagttaaaataaggctagtccgttatcaacttgaaaaagtggcaccgagtcggtgcgcccaaggggtgttcactgctggcctcggcagtccccaccacattttttt

SEQ ID NO: 1350 - RNA, 147 nt, synthetic construct
  misc_feature 1..147: note = Description of Artificial Sequence: Synthetic polynucleotide
  source 1..147: mol_type = other RNA
gtctggctgtggtggggactggttttagagctagaaatagcaagttaaaataaggctagtccgttatcaacttgaaaaagtggcaccgagtcggtgcaaggggtgttcactgctggcctccgcagtccccaccacagccagtttttt

SEQ ID NO: 1351 - RNA, 147 nt, synthetic construct
  misc_feature 1..147: note = Description of Artificial Sequence: Synthetic polynucleotide
  source 1..147: mol_type = other RNA
gtctggctgtggtggggactggttttagagctagaaatagcaagttaaaataaggctagtccgttatcaacttgaaaaagtggcaccgagtcggtgcaaggggtgttcactgctggcctcggcagtccccaccacagccagtttttt

SEQ ID NO: 1352 - RNA, 147 nt, synthetic construct
  misc_feature 1..147: note = Description of Artificial Sequence: Synthetic polynucleotide
  source 1..147: mol_type = other RNA
gtctggctgtggtggggactggttttagagctagaaatagcaagttaaaataaggctagtccgttatcaacttgaaaaagtggcaccgagtcggtgcaaggggtgttcactgctggcctcagcagtccccaccacagccagtttttt

SEQ ID NO: 1353 - RNA, 147 nt, synthetic construct
  misc_feature 1..147: note = Description of Artificial Sequence: Synthetic polynucleotide
  source 1..147: mol_type = other RNA
tctggctgtggtggggactggttttagagctagaaatagcaagttaaaataaggctagtccgttatcaacttgaaaaagtggcaccgagtcggtgcgccacgcccaaggggtgttcactgctggcctctgcagtccccaccacagcc

SEQ ID NO: 1354 - RNA, 147 nt, synthetic construct
  misc_feature 1..147: note = Description of Artificial Sequence: Synthetic polynucleotide
  source 1..147: mol_type = other RNA
gtctggctgtggtggggactggttttagagctagaaatagcaagttaaaataaggctagtccgttatcaacttgaaaaagtggcaccgagtcggtgcgcccaaggggtgttcactgctggcctctgcagtccccaccacattttttt

SEQ ID NO: 1355 - RNA, 147 nt, synthetic construct
  misc_feature 1..147: note = Description of Artificial Sequence: Synthetic polynucleotide
  source 1..147: mol_type = other RNA
tctggctgtggtggggactggttttagagctagaaatagcaagttaaaataaggctagtccgttatcaacttgaaaaagtggcaccgagtcggtgcactgccacgcccaaggggtgttcactgctggcctcggcagtccccaccaca

SEQ ID NO: 1356 - RNA, 147 nt, synthetic construct
  misc_feature 1..147: note = Description of Artificial Sequence: Synthetic polynucleotide
  source 1..147: mol_type = other RNA
gtctggctgtggtggggactggttttagagctagaaatagcaagttaaaataaggctagtccgttatcaacttgaaaaagtggcaccgagtcggtgcgcccaaggggtgttcactgctggcctccgcagtccccaccacattttttt

SEQ ID NO: 1357 - RNA, 148 nt, synthetic construct
  misc_feature 1..148: note = Description of Artificial Sequence: Synthetic polynucleotide
  source 1..148: mol_type = other RNA
tctggctgtggtggggactggttttagagctagaaatagcaagttaaaataaggctagtccgttatcaacttgaaaaagtggcaccgagtcggtgcactgccacgcccaaggggtgttcactgctggcctcggcagtccccaccacag

SEQ ID NO: 1358 - RNA, 148 nt, synthetic construct
  misc_feature 1..148: note = Description of Artificial Sequence: Synthetic polynucleotide
  source 1..148: mol_type = other RNA
gtctggctgtggtggggactggttttagagctagaaatagcaagttaaaataaggctagtccgttatcaacttgaaaaagtggcaccgagtcggtgcacgcccaaggggtgttcactgctggcctcggcagtccccaccacttttttt

SEQ ID NO: 1359 - RNA, 148 nt, synthetic construct
  misc_feature 1..148: note = Description of Artificial Sequence: Synthetic polynucleotide
  source 1..148: mol_type = other RNA
gtctggctgtggtggggactggttttagagctagaaatagcaagttaaaataaggctagtccgttatcaacttgaaaaagtggcaccgagtcggtgcgcccaaggggtgttcactgctggcctctgcagtccccaccacagttttttt

SEQ ID NO: 1360 - RNA, 148 nt, synthetic construct
  misc_feature 1..148: note = Description of Artificial Sequence: Synthetic polynucleotide
  source 1..148: mol_type = other RNA
gtctggctgtggtggggactggttttagagctagaaatagcaagttaaaataaggctagtccgttatcaacttgaaaaagtggcaccgagtcggtgcgccacgcccaaggggtgttcactgctggcctccgcagtccccacttttttt

SEQ ID NO: 1361 - RNA, 148 nt, synthetic construct
  misc_feature 1..148: note = Description of Artificial Sequence: Synthetic polynucleotide
  source 1..148: mol_type = other RNA
gtctggctgtggtggggactggttttagagctagaaatagcaagttaaaataaggctagtccgttatcaacttgaaaaagtggcaccgagtcggtgcacgcccaaggggtgttcactgctggcctctgcagtccccaccacttttttt

SEQ ID NO: 1362 - RNA, 148 nt, synthetic construct
  misc_feature 1..148: note = Description of Artificial Sequence: Synthetic polynucleotide
  source 1..148: mol_type = other RNA
tctggctgtggtggggactggttttagagctagaaatagcaagttaaaataaggctagtccgttatcaacttgaaaaagtggcaccgagtcggtgcactgccacgcccaaggggtgttcactgctggcctccgcagtccccaccacag

SEQ ID NO: 1363 - RNA, 148 nt, synthetic construct
  misc_feature 1..148: note = Description of Artificial Sequence: Synthetic polynucleotide
  source 1..148: mol_type = other RNA
tctggctgtggtggggactggttttagagctagaaatagcaagttaaaataaggctagtccgttatcaacttgaaaaagtggcaccgagtcggtgctgccacgcccaaggggtgttcactgctggcctcggcagtccccaccacagcc

SEQ ID NO: 1364 - RNA, 148 nt, synthetic construct
  misc_feature 1..148: note = Description of Artificial Sequence: Synthetic polynucleotide
  source 1..148: mol_type = other RNA
tctggctgtggtggggactggttttagagctagaaatagcaagttaaaataaggctagtccgttatcaacttgaaaaagtggcaccgagtcggtgcactgccacgcccaaggggtgttcactgctggcctcagcagtccccaccacag

SEQ ID NO: 1365 - RNA, 148 nt, synthetic construct
  misc_feature 1..148: note = Description of Artificial Sequence: Synthetic polynucleotide
  source 1..148: mol_type = other RNA
gtctggctgtggtggggactggttttagagctagaaatagcaagttaaaataaggctagtccgttatcaacttgaaaaagtggcaccgagtcggtgcgcccaaggggtgttcactgctggcctcagcagtccccaccacagttttttt

SEQ ID NO: 1366 - RNA, 148 nt, synthetic construct
  misc_feature 1..148: note = Description of Artificial Sequence: Synthetic polynucleotide
  source 1..148: mol_type = other RNA
gtctggctgtggtggggactggttttagagctagaaatagcaagttaaaataaggctagtccgttatcaacttgaaaaagtggcaccgagtcggtgcgccacgcccaaggggtgttcactgctggcctcagcagtccccacttttttt

SEQ ID NO: 1367 - RNA, 148 nt, synthetic construct
  misc_feature 1..148: note = Description of Artificial Sequence: Synthetic polynucleotide
  source 1..148: mol_type = other RNA
gtctggctgtggtggggactggttttagagctagaaatagcaagttaaaataaggctagtccgttatcaacttgaaaaagtggcaccgagtcggtgcgcccaaggggtgttcactgctggcctcggcagtccccaccacagttttttt

SEQ ID NO: 1368 - RNA, 148 nt, synthetic construct
  misc_feature 1..148: note = Description of Artificial Sequence: Synthetic polynucleotide
  source 1..148: mol_type = other RNA
tctggctgtggtggggactggttttagagctagaaatagcaagttaaaataaggctagtccgttatcaacttgaaaaagtggcaccgagtcggtgctgccacgcccaaggggtgttcactgctggcctctgcagtccccaccacagcc

SEQ ID NO: 1369 - RNA, 148 nt, synthetic construct
  misc_feature 1..148: note = Description of Artificial Sequence: Synthetic polynucleotide
  source 1..148: mol_type = other RNA
tctggctgtggtggggactggttttagagctagaaatagcaagttaaaataaggctagtccgttatcaacttgaaaaagtggcaccgagtcggtgcactgccacgcccaaggggtgttcactgctggcctctgcagtccccaccacag

SEQ ID NO: 1370 - RNA, 148 nt, synthetic construct
  misc_feature 1..148: note = Description of Artificial Sequence: Synthetic polynucleotide
  source 1..148: mol_type = other RNA
tctggctgtggtggggactggttttagagctagaaatagcaagttaaaataaggctagtccgttatcaacttgaaaaagtggcaccgagtcggtgctgccacgcccaaggggtgttcactgctggcctccgcagtccccaccacagcc

SEQ ID NO: 1371 - RNA, 148 nt, synthetic construct
  misc_feature 1..148: note = Description of Artificial Sequence: Synthetic polynucleotide
  source 1..148: mol_type = other RNA
gtctggctgtggtggggactggttttagagctagaaatagcaagttaaaataaggctagtccgttatcaacttgaaaaagtggcaccgagtcggtgcgccacgcccaaggggtgttcactgctggcctctgcagtccccacttttttt

SEQ ID NO: 1372 - RNA, 148 nt, synthetic construct
  misc_feature 1..148: note = Description of Artificial Sequence: Synthetic polynucleotide
  source 1..148: mol_type = other RNA
gtctggctgtggtggggactggttttagagctagaaatagcaagttaaaataaggctagtccgttatcaacttgaaaaagtggcaccgagtcggtgcgcccaaggggtgttcactgctggcctccgcagtccccaccacagttttttt

SEQ ID NO: 1373 - RNA, 148 nt, synthetic construct
  misc_feature 1..148: note = Description of Artificial Sequence: Synthetic polynucleotide
  source 1..148: mol_type = other RNA
gtctggctgtggtggggactggttttagagctagaaatagcaagttaaaataaggctagtccgttatcaacttgaaaaagtggcaccgagtcggtgcgccacgcccaaggggtgttcactgctggcctcggcagtccccacttttttt

SEQ ID NO: 1374 - RNA, 148 nt, synthetic construct
  misc_feature 1..148: note = Description of Artificial Sequence: Synthetic polynucleotide
  source 1..148: mol_type = other RNA
gtctggctgtggtggggactggttttagagctagaaatagcaagttaaaataaggctagtccgttatcaacttgaaaaagtggcaccgagtcggtgcacgcccaaggggtgttcactgctggcctcagcagtccccaccacttttttt

SEQ ID NO: 1375 - RNA, 148 nt, synthetic construct
  misc_feature 1..148: note = Description of Artificial Sequence: Synthetic polynucleotide
  source 1..148: mol_type = other RNA
gtctggctgtggtggggactggttttagagctagaaatagcaagttaaaataaggctagtccgttatcaacttgaaaaagtggcaccgagtcggtgcacgcccaaggggtgttcactgctggcctccgcagtccccaccacttttttt

SEQ ID NO: 1376 - RNA, 148 nt, synthetic construct
  misc_feature 1..148: note = Description of Artificial Sequence: Synthetic polynucleotide
  source 1..148: mol_type = other RNA
tctggctgtggtggggactggttttagagctagaaatagcaagttaaaataaggctagtccgttatcaacttgaaaaagtggcaccgagtcggtgctgccacgcccaaggggtgttcactgctggcctcagcagtccccaccacagcc

SEQ ID NO: 1377 - RNA, 149 nt, synthetic construct
  misc_feature 1..149: note = Description of Artificial Sequence: Synthetic polynucleotide
  source 1..149: mol_type = other RNA
gtctggctgtggtggggactggttttagagctagaaatagcaagttaaaataaggctagtccgttatcaacttgaaaaagtggcaccgagtcggtgcacgcccaaggggtgttcactgctggcctcagcagtccccaccacattttttt

SEQ ID NO: 1378 - RNA, 149 nt, synthetic construct
  misc_feature 1..149: note = Description of Artificial Sequence: Synthetic polynucleotide
  source 1..149: mol_type = other RNA
gtctggctgtggtggggactggttttagagctagaaatagcaagttaaaataaggctagtccgttatcaacttgaaaaagtggcaccgagtcggtgcacgcccaaggggtgttcactgctggcctctgcagtccccaccacattttttt

SEQ ID NO: 1379 - RNA, 149 nt, synthetic construct
  misc_feature 1..149: note = Description of Artificial Sequence: Synthetic polynucleotide
  source 1..149: mol_type = other RNA
gtctggctgtggtggggactggttttagagctagaaatagcaagttaaaataaggctagtccgttatcaacttgaaaaagtggcaccgagtcggtgcgcccaaggggtgttcactgctggcctcagcagtccccaccacagcttttttt

SEQ ID NO: 1380 - RNA, 149 nt, synthetic construct
  misc_feature 1..149: note = Description of Artificial Sequence: Synthetic polynucleotide
  source 1..149: mol_type = other RNA
gtctggctgtggtggggactggttttagagctagaaatagcaagttaaaataaggctagtccgttatcaacttgaaaaagtggcaccgagtcggtgctgccacgcccaaggggtgttcactgctggcctcggcagtccccacttttttt

SEQ ID NO: 1381 - RNA, 149 nt, synthetic construct
  misc_feature 1..149: note = Description of Artificial Sequence: Synthetic polynucleotide
  source 1..149: mol_type = other RNA
gtctggctgtggtggggactggttttagagctagaaatagcaagttaaaataaggctagtccgttatcaacttgaaaaagtggcaccgagtcggtgctgccacgcccaaggggtgttcactgctggcctccgcagtccccacttttttt

SEQ ID NO: 1382 - RNA, 149 nt, synthetic construct
  misc_feature 1..149: note = Description of Artificial Sequence: Synthetic polynucleotide
  source 1..149: mol_type = other RNA
gtctggctgtggtggggactggttttagagctagaaatagcaagttaaaataaggctagtccgttatcaacttgaaaaagtggcaccgagtcggtgcgccacgcccaaggggtgttcactgctggcctctgcagtccccaccttttttt

SEQ ID NO: 1383 - RNA, 149 nt, synthetic construct
  misc_feature 1..149: note = Description of Artificial Sequence: Synthetic polynucleotide
  source 1..149: mol_type = other RNA
tctggctgtggtggggactggttttagagctagaaatagcaagttaaaataaggctagtccgttatcaacttgaaaaagtggcaccgagtcggtgcactgccacgcccaaggggtgttcactgctggcctccgcagtccccaccacagc

SEQ ID NO: 1384 - RNA, 149 nt, synthetic construct
  misc_feature 1..149: note = Description of Artificial Sequence: Synthetic polynucleotide
  source 1..149: mol_type = other RNA
gtctggctgtggtggggactggttttagagctagaaatagcaagttaaaataaggctagtccgttatcaacttgaaaaagtggcaccgagtcggtgcgccacgcccaaggggtgttcactgctggcctcagcagtccccaccttttttt

SEQ ID NO: 1385 - RNA, 149 nt, synthetic construct
  misc_feature 1..149: note = Description of Artificial Sequence: Synthetic polynucleotide
  source 1..149: mol_type = other RNA
gtctggctgtggtggggactggttttagagctagaaatagcaagttaaaataaggctagtccgttatcaacttgaaaaagtggcaccgagtcggtgctgccacgcccaaggggtgttcactgctggcctctgcagtccccacttttttt

SEQ ID NO: 1386 - RNA, 149 nt, synthetic construct
  misc_feature 1..149: note = Description of Artificial Sequence: Synthetic polynucleotide
  source 1..149: mol_type = other RNA
gtctggctgtggtggggactggttttagagctagaaatagcaagttaaaataaggctagtccgttatcaacttgaaaaagtggcaccgagtcggtgcgcccaaggggtgttcactgctggcctctgcagtccccaccacagcttttttt

SEQ ID NO: 1387 - RNA, 149 nt, synthetic construct
  misc_feature 1..149: note = Description of Artificial Sequence: Synthetic polynucleotide
  source 1..149: mol_type = other RNA
gtctggctgtggtggggactggttttagagctagaaatagcaagttaaaataaggctagtccgttatcaacttgaaaaagtggcaccgagtcggtgctgccacgcccaaggggtgttcactgctggcctcagcagtccccacttttttt

SEQ ID NO: 1388 - RNA, 149 nt, synthetic construct
  misc_feature 1..149: note = Description of Artificial Sequence: Synthetic polynucleotide
  source 1..149: mol_type = other RNA
tctggctgtggtggggactggttttagagctagaaatagcaagttaaaataaggctagtccgttatcaacttgaaaaagtggcaccgagtcggtgcactgccacgcccaaggggtgttcactgctggcctcagcagtccccaccacagc

SEQ ID NO: 1389 - RNA, 149 nt, synthetic construct
  misc_feature 1..149: note = Description of Artificial Sequence: Synthetic polynucleotide
  source 1..149: mol_type = other RNA
gtctggctgtggtggggactggttttagagctagaaatagcaagttaaaataaggctagtccgttatcaacttgaaaaagtggcaccgagtcggtgcgccacgcccaaggggtgttcactgctggcctcggcagtccccaccttttttt

SEQ ID NO: 1390 - RNA, 149 nt, synthetic construct
  misc_feature 1..149: note = Description of Artificial Sequence: Synthetic polynucleotide
  source 1..149: mol_type = other RNA
gtctggctgtggtggggactggttttagagctagaaatagcaagttaaaataaggctagtccgttatcaacttgaaaaagtggcaccgagtcggtgcacgcccaaggggtgttcactgctggcctccgcagtccccaccacattttttt

SEQ ID NO: 1391 - RNA, 149 nt, synthetic construct
  misc_feature 1..149: note = Description of Artificial Sequence: Synthetic polynucleotide
  source 1..149: mol_type = other RNA
gtctggctgtggtggggactggttttagagctagaaatagcaagttaaaataaggctagtccgttatcaacttgaaaaagtggcaccgagtcggtgcgcccaaggggtgttcactgctggcctcggcagtccccaccacagcttttttt

SEQ ID NO: 1392 - RNA, 149 nt, synthetic construct
  misc_feature 1..149: note = Description of Artificial Sequence: Synthetic polynucleotide
  source 1..149: mol_type = other RNA
gtctggctgtggtggggactggttttagagctagaaatagcaagttaaaataaggctagtccgttatcaacttgaaaaagtggcaccgagtcggtgcacgcccaaggggtgttcactgctggcctcggcagtccccaccacattttttt

SEQ ID NO: 1393 - RNA, 149 nt, synthetic construct
  misc_feature 1..149: note = Description of Artificial Sequence: Synthetic polynucleotide
  source 1..149: mol_type = other RNA
gtctggctgtggtggggactggttttagagctagaaatagcaagttaaaataaggctagtccgttatcaacttgaaaaagtggcaccgagtcggtgcgccacgcccaaggggtgttcactgctggcctccgcagtccccaccttttttt

SEQ ID NO: 1394 - RNA, 149 nt, synthetic construct
  misc_feature 1..149: note = Description of Artificial Sequence: Synthetic polynucleotide
  source 1..149: mol_type = other RNA
gtctggctgtggtggggactggttttagagctagaaatagcaagttaaaataaggctagtccgttatcaacttgaaaaagtggcaccgagtcggtgcgcccaaggggtgttcactgctggcctccgcagtccccaccacagcttttttt

SEQ ID NO: 1395 - RNA, 149 nt, synthetic construct
  misc_feature 1..149: note = Description of Artificial Sequence: Synthetic polynucleotide
  source 1..149: mol_type = other RNA
tctggctgtggtggggactggttttagagctagaaatagcaagttaaaataaggctagtccgttatcaacttgaaaaagtggcaccgagtcggtgcactgccacgcccaaggggtgttcactgctggcctctgcagtccccaccacagc

SEQ ID NO: 1396 - RNA, 149 nt, synthetic construct
  misc_feature 1..149: note = Description of Artificial Sequence: Synthetic polynucleotide
  source 1..149: mol_type = other RNA
tctggctgtggtggggactggttttagagctagaaatagcaagttaaaataaggctagtccgttatcaacttgaaaaagtggcaccgagtcggtgcactgccacgcccaaggggtgttcactgctggcctcggcagtccccaccacagc

SEQ ID NO: 1397 - RNA, 150 nt, synthetic construct
  misc_feature 1..150: note = Description of Artificial Sequence: Synthetic polynucleotide
  source 1..150: mol_type = other RNA
gtctggctgtggtggggactggttttagagctagaaatagcaagttaaaataaggctagtccgttatcaacttgaaaaagtggcaccgagtcggtgcacgcccaaggggtgttcactgctggcctcagcagtccccaccacagttttttt

SEQ ID NO: 1398 - RNA, 150 nt, synthetic construct
  misc_feature 1..150: note = Description of Artificial Sequence: Synthetic polynucleotide
  source 1..150: mol_type = other RNA
gtctggctgtggtggggactggttttagagctagaaatagcaagttaaaataaggctagtccgttatcaacttgaaaaagtggcaccgagtcggtgcgccacgcccaaggggtgttcactgctggcctctgcagtccccaccattttttt

SEQ ID NO: 1399 - RNA, 150 nt, synthetic construct
  misc_feature 1..150: note = Description of Artificial Sequence: Synthetic polynucleotide
  source 1..150: mol_type = other RNA
gtctggctgtggtggggactggttttagagctagaaatagcaagttaaaataaggctagtccgttatcaacttgaaaaagtggcaccgagtcggtgcgcccaaggggtgttcactgctggcctccgcagtccccaccacagccttttttt

SEQ ID NO: 1400 - RNA, 150 nt, synthetic construct
  misc_feature 1..150: note = Description of Artificial Sequence: Synthetic polynucleotide
  source 1..150: mol_type = other RNA
gtctggctgtggtggggactggttttagagctagaaatagcaagttaaaataaggctagtccgttatcaacttgaaaaagtggcaccgagtcggtgctgccacgcccaaggggtgttcactgctggcctcagcagtccccaccttttttt

SEQ ID NO: 1401 - RNA, 150 nt, synthetic construct
  misc_feature 1..150: note = Description of Artificial Sequence: Synthetic polynucleotide
  source 1..150: mol_type = other RNA
gtctggctgtggtggggactggttttagagctagaaatagcaagttaaaataaggctagtccgttatcaacttgaaaaagtggcaccgagtcggtgcgccacgcccaaggggtgttcactgctggcctcggcagtccccaccattttttt

SEQ ID NO: 1402 - RNA, 150 nt, synthetic construct
  misc_feature 1..150: note = Description of Artificial Sequence: Synthetic polynucleotide
  source 1..150: mol_type = other RNA
gtctggctgtggtggggactggttttagagctagaaatagcaagttaaaataaggctagtccgttatcaacttgaaaaagtggcaccgagtcggtgcgcccaaggggtgttcactgctggcctctgcagtccccaccacagccttttttt

SEQ ID NO: 1403 - RNA, 150 nt, synthetic construct
  misc_feature 1..150: note = Description of Artificial Sequence: Synthetic polynucleotide
  source 1..150: mol_type = other RNA
gtctggctgtggtggggactggttttagagctagaaatagcaagttaaaataaggctagtccgttatcaacttgaaaaagtggcaccgagtcggtgcgcccaaggggtgttcactgctggcctcggcagtccccaccacagccttttttt

SEQ ID NO: 1404 - RNA, 150 nt, synthetic construct
  misc_feature 1..150: note = Description of Artificial Sequence: Synthetic polynucleotide
  source 1..150: mol_type = other RNA
gtctggctgtggtggggactggttttagagctagaaatagcaagttaaaataaggctagtccgttatcaacttgaaaaagtggcaccgagtcggtgcacgcccaaggggtgttcactgctggcctctgcagtccccaccacagttttttt

SEQ ID NO: 1405 - RNA, 150 nt, synthetic construct
  misc_feature 1..150: note = Description of Artificial Sequence: Synthetic polynucleotide
  source 1..150: mol_type = other RNA
gtctggctgtggtggggactggttttagagctagaaatagcaagttaaaataaggctagtccgttatcaacttgaaaaagtggcaccgagtcggtgcgccacgcccaaggggtgttcactgctggcctcagcagtccccaccattttttt

SEQ ID NO: 1406 - RNA, 150 nt, synthetic construct
  misc_feature 1..150: note = Description of Artificial Sequence: Synthetic polynucleotide
  source 1..150: mol_type = other RNA
gtctggctgtggtggggactggttttagagctagaaatagcaagttaaaataaggctagtccgttatcaacttgaaaaagtggcaccgagtcggtgctgccacgcccaaggggtgttcactgctggcctccgcagtccccaccttttttt

SEQ ID NO: 1407 - RNA, 150 nt, synthetic construct
  misc_feature 1..150: note = Description of Artificial Sequence: Synthetic polynucleotide
  source 1..150: mol_type = other RNA
gtctggctgtggtggggactggttttagagctagaaatagcaagttaaaataaggctagtccgttatcaacttgaaaaagtggcaccgagtcggtgctgccacgcccaaggggtgttcactgctggcctcggcagtccccaccttttttt

SEQ ID NO: 1408 - RNA, 150 nt, synthetic construct
  misc_feature 1..150: note = Description of Artificial Sequence: Synthetic polynucleotide
  source 1..150: mol_type = other RNA
gtctggctgtggtggggactggttttagagctagaaatagcaagttaaaataaggctagtccgttatcaacttgaaaaagtggcaccgagtcggtgcacgcccaaggggtgttcactgctggcctcggcagtccccaccacagttttttt

SEQ ID NO: 1409 - RNA, 150 nt, synthetic construct
  misc_feature 1..150: note = Description of Artificial Sequence: Synthetic polynucleotide
  source 1..150: mol_type = other RNA
gtctggctgtggtggggactggttttagagctagaaatagcaagttaaaataaggctagtccgttatcaacttgaaaaagtggcaccgagtcggtgctgccacgcccaaggggtgttcactgctggcctctgcagtccccaccttttttt

SEQ ID NO: 1410 - RNA, 150 nt, synthetic construct
  misc_feature 1..150: note = Description of Artificial Sequence: Synthetic polynucleotide
  source 1..150: mol_type = other RNA
gtctggctgtggtggggactggttttagagctagaaatagcaagttaaaataaggctagtccgttatcaacttgaaaaagtggcaccgagtcggtgcacgcccaaggggtgttcactgctggcctccgcagtccccaccacagttttttt

SEQ ID NO: 1411 - RNA, 150 nt, synthetic construct
  misc_feature 1..150: note = Description of Artificial Sequence: Synthetic polynucleotide
  source 1..150: mol_type = other RNA
gtctggctgtggtggggactggttttagagctagaaatagcaagttaaaataaggctagtccgttatcaacttgaaaaagtggcaccgagtcggtgcgccacgcccaaggggtgttcactgctggcctccgcagtccccaccattttttt

SEQ ID NO: 1412 - RNA, 150 nt, synthetic construct
  misc_feature 1..150: note = Description of Artificial Sequence: Synthetic polynucleotide
  source 1..150: mol_type = other RNA
gtctggctgtggtggggactggttttagagctagaaatagcaagttaaaataaggctagtccgttatcaacttgaaaaagtggcaccgagtcggtgcgcccaaggggtgttcactgctggcctcagcagtccccaccacagccttttttt

SEQ ID NO: 1413 - RNA, 150 nt, synthetic construct
  misc_feature 1..150: note = Description of Artificial Sequence: Synthetic polynucleotide
  source 1..150: mol_type = other RNA
tctggctgtggtggggactggttttagagctagaaatagcaagttaaaataaggctagtccgttatcaacttgaaaaagtggcaccgagtcggtgcactgccacgcccaaggggtgttcactgctggcctcagcagtccccaccacagcc

SEQ ID NO: 1414 - RNA, 150 nt, synthetic construct
  misc_feature 1..150: note = Description of Artificial Sequence: Synthetic polynucleotide
  source 1..150: mol_type = other RNA
tctggctgtggtggggactggttttagagctagaaatagcaagttaaaataaggctagtccgttatcaacttgaaaaagtggcaccgagtcggtgcactgccacgcccaaggggtgttcactgctggcctcggcagtccccaccacagcc

SEQ ID NO: 1415 - RNA, 150 nt, synthetic construct
  misc_feature 1..150: note = Description of Artificial Sequence: Synthetic polynucleotide
  source 1..150: mol_type = other RNA
tctggctgtggtggggactggttttagagctagaaatagcaagttaaaataaggctagtccgttatcaacttgaaaaagtggcaccgagtcggtgcactgccacgcccaaggggtgttcactgctggcctccgcagtccccaccacagcc

SEQ ID NO: 1416 - RNA, 150 nt, synthetic construct
  misc_feature 1..150: note = Description of Artificial Sequence: Synthetic polynucleotide
  source 1..150: mol_type = other RNA
tctggctgtggtggggactggttttagagctagaaatagcaagttaaaataaggctagtccgttatcaacttgaaaaagtggcaccgagtcggtgcactgccacgcccaaggggtgttcactgctggcctctgcagtccccaccacagcc

SEQ ID NO: 1417 - RNA, 151 nt, synthetic construct
  misc_feature 1..151: note = Description of Artificial Sequence: Synthetic polynucleotide
  source 1..151: mol_type = other RNA
gtctggctgtggtggggactggttttagagctagaaatagcaagttaaaataaggctagtccgttatcaacttgaaaaagtggcaccgagtcggtgcacgcccaaggggtgttcactgctggcctctgcagtccccaccacagcttttttt

SEQ ID NO: 1418 - RNA, 151 nt, synthetic construct
  misc_feature 1..151: note = Description of Artificial Sequence: Synthetic polynucleotide
  source 1..151: mol_type = other RNA
gtctggctgtggtggggactggttttagagctagaaatagcaagttaaaataaggctagtccgttatcaacttgaaaaagtggcaccgagtcggtgcacgcccaaggggtgttcactgctggcctccgcagtccccaccacagcttttttt

SEQ ID NO: 1419 - RNA, 151 nt, synthetic construct
  misc_feature 1..151: note = Description of Artificial Sequence: Synthetic polynucleotide
  source 1..151: mol_type = other RNA
gtctggctgtggtggggactggttttagagctagaaatagcaagttaaaataaggctagtccgttatcaacttgaaaaagtggcaccgagtcggtgcacgcccaaggggtgttcactgctggcctcggcagtccccaccacagcttttttt

SEQ ID NO: 1420 - RNA, 151 nt, synthetic construct
  misc_feature 1..151: note = Description of Artificial Sequence: Synthetic polynucleotide
  source 1..151: mol_type = other RNA
gtctggctgtggtggggactggttttagagctagaaatagcaagttaaaataaggctagtccgttatcaacttgaaaaagtggcaccgagtcggtgcactgccacgcccaaggggtgttcactgctggcctcagcagtccccacttttttt

SEQ ID NO: 1421 - RNA, 151 nt, synthetic construct
  misc_feature 1..151: note = Description of Artificial Sequence: Synthetic polynucleotide
  source 1..151: mol_type = other RNA
gtctggctgtggtggggactggttttagagctagaaatagcaagttaaaataaggctagtccgttatcaacttgaaaaagtggcaccgagtcggtgcgccacgcccaaggggtgttcactgctggcctcggcagtccccaccacttttttt

SEQ ID NO: 1422 - RNA, 151 nt, synthetic construct
  misc_feature 1..151: note = Description of Artificial Sequence: Synthetic polynucleotide
  source 1..151: mol_type = other RNA
gtctggctgtggtggggactggttttagagctagaaatagcaagttaaaataaggctagtccgttatcaacttgaaaaagtggcaccgagtcggtgcgccacgcccaaggggtgttcactgctggcctcagcagtccccaccacttttttt

SEQ ID NO: 1423 - RNA, 151 nt, synthetic construct
  misc_feature 1..151: note = Description of Artificial Sequence: Synthetic polynucleotide
  source 1..151: mol_type = other RNA
gtctggctgtggtggggactggttttagagctagaaatagcaagttaaaataaggctagtccgttatcaacttgaaaaagtggcaccgagtcggtgcactgccacgcccaaggggtgttcactgctggcctctgcagtccccacttttttt

SEQ ID NO: 1424 - RNA, 151 nt, synthetic construct
  misc_feature 1..151: note = Description of Artificial Sequence: Synthetic polynucleotide
  source 1..151: mol_type = other RNA
gtctggctgtggtggggactggttttagagctagaaatagcaagttaaaataaggctagtccgttatcaacttgaaaaagtggcaccgagtcggtgcgccacgcccaaggggtgttcactgctggcctccgcagtccccaccacttttttt

SEQ ID NO: 1425 - RNA, 151 nt, synthetic construct
  misc_feature 1..151: note = Description of Artificial Sequence: Synthetic polynucleotide
  source 1..151: mol_type = other RNA
gtctggctgtggtggggactggttttagagctagaaatagcaagttaaaataaggctagtccgttatcaacttgaaaaagtggcaccgagtcggtgctgccacgcccaaggggtgttcactgctggcctcggcagtccccaccattttttt

SEQ ID NO: 1426 - RNA, 151 nt, synthetic construct
  misc_feature 1..151: note = Description of Artificial Sequence: Synthetic polynucleotide
  source 1..151: mol_type = other RNA
gtctggctgtggtggggactggttttagagctagaaatagcaagttaaaataaggctagtccgttatcaacttgaaaaagtggcaccgagtcggtgcgccacgcccaaggggtgttcactgctggcctctgcagtccccaccacttttttt

SEQ ID NO: 1427 - RNA, 151 nt, synthetic construct
  misc_feature 1..151: note = Description of Artificial Sequence: Synthetic polynucleotide
  source 1..151: mol_type = other RNA
gtctggctgtggtggggactggttttagagctagaaatagcaagttaaaataaggctagtccgttatcaacttgaaaaagtggcaccgagtcggtgctgccacgcccaaggggtgttcactgctggcctcagcagtccccaccattttttt

SEQ ID NO: 1428 - RNA, 151 nt, synthetic construct
  misc_feature 1..151: note = Description of Artificial Sequence: Synthetic polynucleotide
  source 1..151: mol_type = other RNA
gtctggctgtggtggggactggttttagagctagaaatagcaagttaaaataaggctagtccgttatcaacttgaaaaagtggcaccgagtcggtgctgccacgcccaaggggtgttcactgctggcctctgcagtccccaccattttttt

SEQ ID NO: 1429 - RNA, 151 nt, synthetic construct
  misc_feature 1..151: note = Description of Artificial Sequence: Synthetic polynucleotide
  source 1..151: mol_type = other RNA
gtctggctgtggtggggactggttttagagctagaaatagcaagttaaaataaggctagtccgttatcaacttgaaaaagtggcaccgagtcggtgcacgcccaaggggtgttcactgctggcctcagcagtccccaccacagcttttttt

SEQ ID NO: 1430 - RNA, 151 nt, synthetic construct
  misc_feature 1..151: note = Description of Artificial Sequence: Synthetic polynucleotide
  source 1..151: mol_type = other RNA
gtctggctgtggtggggactggttttagagctagaaatagcaagttaaaataaggctagtccgttatcaacttgaaaaagtggcaccgagtcggtgcactgccacgcccaaggggtgttcactgctggcctccgcagtccccacttttttt

SEQ ID NO: 1431 - RNA, 151 nt, synthetic construct
  misc_feature 1..151: note = Description of Artificial Sequence: Synthetic polynucleotide
  source 1..151: mol_type = other RNA
gtctggctgtggtggggactggttttagagctagaaatagcaagttaaaataaggctagtccgttatcaacttgaaaaagtggcaccgagtcggtgctgccacgcccaaggggtgttcactgctggcctccgcagtccccaccattttttt

SEQ ID NO: 1432 - RNA, 151 nt, synthetic construct
  misc_feature 1..151: note = Description of Artificial Sequence: Synthetic polynucleotide
  source 1..151: mol_type = other RNA
gtctggctgtggtggggactggttttagagctagaaatagcaagttaaaataaggctagtccgttatcaacttgaaaaagtggcaccgagtcggtgcactgccacgcccaaggggtgttcactgctggcctcggcagtccccacttttttt

SEQ ID NO: 1433 - RNA, 152 nt, synthetic construct
  misc_feature 1..152: note = Description of Artificial Sequence: Synthetic polynucleotide
  source 1..152: mol_type = other RNA
gtctggctgtggtggggactggttttagagctagaaatagcaagttaaaataaggctagtccgttatcaacttgaaaaagtggcaccgagtcggtgcgccacgcccaaggggtgttcactgctggcctcggcagtccccaccacattttttt

SEQ ID NO: 1434 - RNA, 152 nt, synthetic construct
  misc_feature 1..152: note = Description of Artificial Sequence: Synthetic polynucleotide
  source 1..152: mol_type = other RNA
gtctggctgtggtggggactggttttagagctagaaatagcaagttaaaataaggctagtccgttatcaacttgaaaaagtggcaccgagtcggtgcgccacgcccaaggggtgttcactgctggcctccgcagtccccaccacattttttt

SEQ ID NO: 1435 - RNA, 152 nt, synthetic construct
  misc_feature 1..152: note = Description of Artificial Sequence: Synthetic polynucleotide
  source 1..152: mol_type = other RNA
gtctggctgtggtggggactggttttagagctagaaatagcaagttaaaataaggctagtccgttatcaacttgaaaaagtggcaccgagtcggtgcactgccacgcccaaggggtgttcactgctggcctccgcagtccccaccttttttt

SEQ ID NO: 1436 - RNA, 152 nt, synthetic construct
  misc_feature 1..152: note = Description of Artificial Sequence: Synthetic polynucleotide
  source 1..152: mol_type = other RNA
gtctggctgtggtggggactggttttagagctagaaatagcaagttaaaataaggctagtccgttatcaacttgaaaaagtggcaccgagtcggtgcacgcccaaggggtgttcactgctggcctcagcagtccccaccacagccttttttt

SEQ ID NO: 1437 - RNA, 152 nt, synthetic construct
  misc_feature 1..152: note = Description of Artificial Sequence: Synthetic polynucleotide
  source 1..152: mol_type = other RNA
gtctggctgtggtggggactggttttagagctagaaatagcaagttaaaataaggctagtccgttatcaacttgaaaaagtggcaccgagtcggtgctgccacgcccaaggggtgttcactgctggcctccgcagtccccaccacttttttt

SEQ ID NO: 1438 - RNA, 152 nt, synthetic construct
  misc_feature 1..152: note = Description of Artificial Sequence: Synthetic polynucleotide
  source 1..152: mol_type = other RNA
gtctggctgtggtggggactggttttagagctagaaatagcaagttaaaataaggctagtccgttatcaacttgaaaaagtggcaccgagtcggtgcacgcccaaggggtgttcactgctggcctccgcagtccccaccacagccttttttt

SEQ ID NO: 1439 - RNA, 152 nt, synthetic construct
  misc_feature 1..152: note = Description of Artificial Sequence: Synthetic polynucleotide
  source 1..152: mol_type = other RNA
gtctggctgtggtggggactggttttagagctagaaatagcaagttaaaataaggctagtccgttatcaacttgaaaaagtggcaccgagtcggtgcactgccacgcccaaggggtgttcactgctggcctctgcagtccccaccttttttt

SEQ ID NO: 1440 - RNA, 152 nt, synthetic construct
  misc_feature 1..152: note = Description of Artificial Sequence: Synthetic polynucleotide
  source 1..152: mol_type = other RNA
gtctggctgtggtggggactggttttagagctagaaatagcaagttaaaataaggctagtccgttatcaacttgaaaaagtggcaccgagtcggtgctgccacgcccaaggggtgttcactgctggcctcagcagtccccaccacttttttt

SEQ ID NO: 1441 - RNA, 152 nt, synthetic construct
  misc_feature 1..152: note = Description of Artificial Sequence: Synthetic polynucleotide
  source 1..152: mol_type = other RNA
gtctggctgtggtggggactggttttagagctagaaatagcaagttaaaataaggctagtccgttatcaacttgaaaaagtggcaccgagtcggtgcactgccacgcccaaggggtgttcactgctggcctcagcagtccccaccttttttt

SEQ ID NO: 1442 - RNA, 152 nt, synthetic construct
  misc_feature 1..152: note = Description of Artificial Sequence: Synthetic polynucleotide
  source 1..152: mol_type = other RNA
gtctggctgtggtggggactggttttagagctagaaatagcaagttaaaataaggctagtccgttatcaacttgaaaaagtggcaccgagtcggtgcgccacgcccaaggggtgttcactgctggcctcagcagtccccaccacattttttt

SEQ ID NO: 1443 - RNA, 152 nt, synthetic construct
  misc_feature 1..152: note = Description of Artificial Sequence: Synthetic polynucleotide
  source 1..152: mol_type = other RNA
gtctggctgtggtggggactggttttagagctagaaatagcaagttaaaataaggctagtccgttatcaacttgaaaaagtggcaccgagtcggtgctgccacgcccaaggggtgttcactgctggcctcggcagtccccaccacttttttt

SEQ ID NO: 1444 - RNA, 152 nt, synthetic construct
  misc_feature 1..152: note = Description of Artificial Sequence: Synthetic polynucleotide
  source 1..152: mol_type = other RNA
gtctggctgtggtggggactggttttagagctagaaatagcaagttaaaataaggctagtccgttatcaacttgaaaaagtggcaccgagtcggtgcactgccacgcccaaggggtgttcactgctggcctcggcagtccccaccttttttt

SEQ ID NO: 1445 - RNA, 152 nt, synthetic construct
  misc_feature 1..152: note = Description of Artificial Sequence: Synthetic polynucleotide
  source 1..152: mol_type = other RNA
gtctggctgtggtggggactggttttagagctagaaatagcaagttaaaataaggctagtccgttatcaacttgaaaaagtggcaccgagtcggtgcacgcccaaggggtgttcactgctggcctctgcagtccccaccacagccttttttt

SEQ ID NO: 1446 - RNA, 152 nt, synthetic construct
  misc_feature 1..152: note = Description of Artificial Sequence: Synthetic polynucleotide
  source 1..152: mol_type = other RNA
gtctggctgtggtggggactggttttagagctagaaatagcaagttaaaataaggctagtccgttatcaacttgaaaaagtggcaccgagtcggtgcgccacgcccaaggggtgttcactgctggcctctgcagtccccaccacattttttt

SEQ ID NO: 1447 - RNA, 152 nt, synthetic construct
  misc_feature 1..152: note = Description of Artificial Sequence: Synthetic polynucleotide
  source 1..152: mol_type = other RNA
gtctggctgtggtggggactggttttagagctagaaatagcaagttaaaataaggctagtccgttatcaacttgaaaaagtggcaccgagtcggtgcacgcccaaggggtgttcactgctggcctcggcagtccccaccacagccttttttt

SEQ ID NO: 1448 - RNA, 152 nt, synthetic construct
  misc_feature 1..152: note = Description of Artificial Sequence: Synthetic polynucleotide
  source 1..152: mol_type = other RNA
gtctggctgtggtggggactggttttagagctagaaatagcaagttaaaataaggctagtccgttatcaacttgaaaaagtggcaccgagtcggtgctgccacgcccaaggggtgttcactgctggcctctgcagtccccaccacttttttt

SEQ ID NO: 1449 - RNA, 153 nt, synthetic construct
  misc_feature 1..153: note = Description of Artificial Sequence: Synthetic polynucleotide
  source 1..153: mol_type = other RNA
gtctggctgtggtggggactggttttagagctagaaatagcaagttaaaataaggctagtccgttatcaacttgaaaaagtggcaccgagtcggtgcgccacgcccaaggggtgttcactgctggcctccgcagtccccaccacagttttttt

SEQ ID NO: 1450 - RNA, 153 nt, synthetic construct
  misc_feature 1..153: note = Description of Artificial Sequence: Synthetic polynucleotide
  source 1..153: mol_type = other RNA
gtctggctgtggtggggactggttttagagctagaaatagcaagttaaaataaggctagtccgttatcaacttgaaaaagtggcaccgagtcggtgctgccacgcccaaggggtgttcactgctggcctcagcagtccccaccacattttttt

SEQ ID NO: 1451 - RNA, 153 nt, synthetic construct
  misc_feature 1..153: note = Description of Artificial Sequence: Synthetic polynucleotide
  source 1..153: mol_type = other RNA
gtctggctgtggtggggactggttttagagctagaaatagcaagttaaaataaggctagtccgttatcaacttgaaaaagtggcaccgagtcggtgcactgccacgcccaaggggtgttcactgctggcctcagcagtccccaccattttttt

SEQ ID NO: 1452 - RNA, 153 nt, synthetic construct
  misc_feature 1..153: note = Description of Artificial Sequence: Synthetic polynucleotide
  source 1..153: mol_type = other RNA
gtctggctgtggtggggactggttttagagctagaaatagcaagttaaaataaggctagtccgttatcaacttgaaaaagtggcaccgagtcggtgctgccacgcccaaggggtgttcactgctggcctctgcagtccccaccacattttttt

SEQ ID NO: 1453 - RNA, 153 nt, synthetic construct
  misc_feature 1..153: note = Description of Artificial Sequence: Synthetic polynucleotide
  source 1..153: mol_type = other RNA
gtctggctgtggtggggactggttttagagctagaaatagcaagttaaaataaggctagtccgttatcaacttgaaaaagtggcaccgagtcggtgcactgccacgcccaaggggtgttcactgctggcctccgcagtccccaccattttttt

SEQ ID NO: 1454 - RNA, 153 nt, synthetic construct
  misc_feature 1..153: note = Description of Artificial Sequence: Synthetic polynucleotide
  source 1..153: mol_type = other RNA
gtctggctgtggtggggactggttttagagctagaaatagcaagttaaaataaggctagtccgttatcaacttgaaaaagtggcaccgagtcggtgcactgccacgcccaaggggtgttcactgctggcctctgcagtccccaccattttttt

SEQ ID NO: 1455 - RNA, 153 nt, synthetic construct
  misc_feature 1..153: note = Description of Artificial Sequence: Synthetic polynucleotide
  source 1..153: mol_type = other RNA
gtctggctgtggtggggactggttttagagctagaaatagcaagttaaaataaggctagtccgttatcaacttgaaaaagtggcaccgagtcggtgcgccacgcccaaggggtgttcactgctggcctcagcagtccccaccacagttttttt

SEQ ID NO: 1456 - RNA, 153 nt, synthetic construct
  misc_feature 1..153: note = Description of Artificial Sequence: Synthetic polynucleotide
  source 1..153: mol_type = other RNA
gtctggctgtggtggggactggttttagagctagaaatagcaagttaaaataaggctagtccgttatcaacttgaaaaagtggcaccgagtcggtgctgccacgcccaaggggtgttcactgctggcctcggcagtccccaccacattttttt

SEQ ID NO: 1457 - RNA, 153 nt, synthetic construct
  misc_feature 1..153: note = Description of Artificial Sequence: Synthetic polynucleotide
  source 1..153: mol_type = other RNA
gtctggctgtggtggggactggttttagagctagaaatagcaagttaaaataaggctagtccgttatcaacttgaaaaagtggcaccgagtcggtgcgccacgcccaaggggtgttcactgctggcctctgcagtccccaccacagttttttt

SEQ ID NO: 1458 - RNA, 153 nt, synthetic construct
  misc_feature 1..153: note = Description of Artificial Sequence: Synthetic polynucleotide
  source 1..153: mol_type = other RNA
gtctggctgtggtggggactggttttagagctagaaatagcaagttaaaataaggctagtccgttatcaacttgaaaaagtggcaccgagtcggtgcactgccacgcccaaggggtgttcactgctggcctcggcagtccccaccattttttt

SEQ ID NO: 1459 - RNA, 153 nt, synthetic construct
  misc_feature 1..153: note = Description of Artificial Sequence: Synthetic polynucleotide
  source 1..153: mol_type = other RNA
gtctggctgtggtggggactggttttagagctagaaatagcaagttaaaataaggctagtccgttatcaacttgaaaaagtggcaccgagtcggtgcgccacgcccaaggggtgttcactgctggcctcggcagtccccaccacagttttttt

SEQ ID NO: 1460 - RNA, 153 nt, synthetic construct
  misc_feature 1..153: note = Description of Artificial Sequence: Synthetic polynucleotide
  source 1..153: mol_type = other RNA
gtctggctgtggtggggactggttttagagctagaaatagcaagttaaaataaggctagtccgttatcaacttgaaaaagtggcaccgagtcggtgctgccacgcccaaggggtgttcactgctggcctccgcagtccccaccacattttttt

SEQ ID NO: 1461 - RNA, 154 nt, synthetic construct
  misc_feature 1..154: note = Description of Artificial Sequence: Synthetic polynucleotide
  source 1..154: mol_type = other RNA
gtctggctgtggtggggactggttttagagctagaaatagcaagttaaaataaggctagtccgttatcaacttgaaaaagtggcaccgagtcggtgcgccacgcccaaggggtgttcactgctggcctccgcagtccccaccacagcttttttt

SEQ ID NO: 1462 - RNA, 154 nt, synthetic construct
  misc_feature 1..154: note = Description of Artificial Sequence: Synthetic polynucleotide
  source 1..154: mol_type = other RNA
gtctggctgtggtggggactggttttagagctagaaatagcaagttaaaataaggctagtccgttatcaacttgaaaaagtggcaccgagtcggtgctgccacgcccaaggggtgttcactgctggcctcggcagtccccaccacagttttttt

SEQ ID NO: 1463 - RNA, 154 nt, synthetic construct
  misc_feature 1..154: note = Description of Artificial Sequence: Synthetic polynucleotide
  source 1..154: mol_type = other RNA
gtctggctgtggtggggactggttttagagctagaaatagcaagttaaaataaggctagtccgttatcaacttgaaaaagtggcaccgagtcggtgcactgccacgcccaaggggtgttcactgctggcctctgcagtccccaccacttttttt

SEQ ID NO: 1464 - RNA, 154 nt, synthetic construct
  misc_feature 1..154: note = Description of Artificial Sequence: Synthetic polynucleotide
  source 1..154: mol_type = other RNA
gtctggctgtggtggggactggttttagagctagaaatagcaagttaaaataaggctagtccgttatcaacttgaaaaagtggcaccgagtcggtgcgccacgcccaaggggtgttcactgctggcctcggcagtccccaccacagcttttttt

SEQ ID NO: 1465 - RNA, 154 nt, synthetic construct
  misc_feature 1..154: note = Description of Artificial Sequence: Synthetic polynucleotide
  source 1..154: mol_type = other RNA
gtctggctgtggtggggactggttttagagctagaaatagcaagttaaaataaggctagtccgttatcaacttgaaaaagtggcaccgagtcggtgctgccacgcccaaggggtgttcactgctggcctctgcagtccccaccacagttttttt

SEQ ID NO: 1466 - RNA, 154 nt, synthetic construct
  misc_feature 1..154: note = Description of Artificial Sequence: Synthetic polynucleotide
  source 1..154: mol_type = other RNA
gtctggctgtggtggggactggttttagagctagaaatagcaagttaaaataaggctagtccgttatcaacttgaaaaagtggcaccgagtcggtgctgccacgcccaaggggtgttcactgctggcctccgcagtccccaccacagttttttt

SEQ ID NO: 1467 - RNA, 154 nt, synthetic construct
  misc_feature 1..154: note = Description of Artificial Sequence: Synthetic polynucleotide
  source 1..154: mol_type = other RNA
gtctggctgtggtggggactggttttagagctagaaatagcaagttaaaataaggctagtccgttatcaacttgaaaaagtggcaccgagtcggtgctgccacgcccaaggggtgttcactgctggcctcagcagtccccaccacagttttttt

SEQ ID NO: 1468 - RNA, 154 nt, synthetic construct
  misc_feature 1..154: note = Description of Artificial Sequence: Synthetic polynucleotide
  source 1..154: mol_type = other RNA
gtctggctgtggtggggactggttttagagctagaaatagcaagttaaaataaggctagtccgttatcaacttgaaaaagtggcaccgagtcggtgcgccacgcccaaggggtgttcactgctggcctctgcagtccccaccacagcttttttt

SEQ ID NO: 1469 - RNA, 154 nt, synthetic construct
  misc_feature 1..154: note = Description of Artificial Sequence: Synthetic polynucleotide
  source 1..154: mol_type = other RNA
gtctggctgtggtggggactggttttagagctagaaatagcaagttaaaataaggctagtccgttatcaacttgaaaaagtggcaccgagtcggtgcactgccacgcccaaggggtgttcactgctggcctcggcagtccccaccacttttttt

SEQ ID NO: 1470 - RNA, 154 nt, synthetic construct
  misc_feature 1..154: note = Description of Artificial Sequence: Synthetic polynucleotide
  source 1..154: mol_type = other RNA
gtctggctgtggtggggactggttttagagctagaaatagcaagttaaaataaggctagtccgttatcaacttgaaaaagtggcaccgagtcggtgcgccacgcccaaggggtgttcactgctggcctcagcagtccccaccacagcttttttt

SEQ ID NO: 1471 - RNA, 154 nt, synthetic construct
  misc_feature 1..154: note = Description of Artificial Sequence: Synthetic polynucleotide
  source 1..154: mol_type = other RNA
gtctggctgtggtggggactggttttagagctagaaatagcaagttaaaataaggctagtccgttatcaacttgaaaaagtggcaccgagtcggtgcactgccacgcccaaggggtgttcactgctggcctccgcagtccccaccacttttttt

SEQ ID NO: 1472 - RNA, 154 nt, synthetic construct
  misc_feature 1..154: note = Description of Artificial Sequence: Synthetic polynucleotide
  source 1..154: mol_type = other RNA
gtctggctgtggtggggactggttttagagctagaaatagcaagttaaaataaggctagtccgttatcaacttgaaaaagtggcaccgagtcggtgcactgccacgcccaaggggtgttcactgctggcctcagcagtccccaccacttttttt

SEQ ID NO: 1473 - RNA, 155 nt, synthetic construct
  misc_feature 1..155: note = Description of Artificial Sequence: Synthetic polynucleotide
  source 1..155: mol_type = other RNA
gtctggctgtggtggggactggttttagagctagaaatagcaagttaaaataaggctagtccgttatcaacttgaaaaagtggcaccgagtcggtgctgccacgcccaaggggtgttcactgctggcctctgcagtccccaccacagcttttttt

SEQ ID NO: 1474 - RNA, 155 nt, synthetic construct
  misc_feature 1..155: note = Description of Artificial Sequence: Synthetic polynucleotide
  source 1..155: mol_type = other RNA
gtctggctgtggtggggactggttttagagctagaaatagcaagttaaaataaggctagtccgttatcaacttgaaaaagtggcaccgagtcggtgcgccacgcccaaggggtgttcactgctggcctctgcagtccccaccacagccttttttt

SEQ ID NO: 1475 - RNA, 155 nt, synthetic construct
  misc_feature 1..155: note = Description of Artificial Sequence: Synthetic polynucleotide
  source 1..155: mol_type = other RNA
gtctggctgtggtggggactggttttagagctagaaatagcaagttaaaataaggctagtccgttatcaacttgaaaaagtggcaccgagtcggtgcgccacgcccaaggggtgttcactgctggcctcggcagtccccaccacagccttttttt

SEQ ID NO: 1476 - RNA, 155 nt, synthetic construct
  misc_feature 1..155: note = Description of Artificial Sequence: Synthetic polynucleotide
  source 1..155: mol_type = other RNA
gtctggctgtggtggggactggttttagagctagaaatagcaagttaaaataaggctagtccgttatcaacttgaaaaagtggcaccgagtcggtgcactgccacgcccaaggggtgttcactgctggcctcggcagtccccaccacattttttt

SEQ ID NO: 1477 - RNA, 155 nt, synthetic construct
  misc_feature 1..155: note = Description of Artificial Sequence: Synthetic polynucleotide
  source 1..155: mol_type = other RNA
gtctggctgtggtggggactggttttagagctagaaatagcaagttaaaataaggctagtccgttatcaacttgaaaaagtggcaccgagtcggtgcgccacgcccaaggggtgttcactgctggcctcagcagtccccaccacagccttttttt

SEQ ID NO: 1478 - RNA, 155 nt, synthetic construct
  misc_feature 1..155: note = Description of Artificial Sequence: Synthetic polynucleotide
  source 1..155: mol_type = other RNA
gtctggctgtggtggggactggttttagagctagaaatagcaagttaaaataaggctagtccgttatcaacttgaaaaagtggcaccgagtcggtgcactgccacgcccaaggggtgttcactgctggcctctgcagtccccaccacattttttt

SEQ ID NO: 1479 - RNA, 155 nt, synthetic construct
  misc_feature 1..155: note = Description of Artificial Sequence: Synthetic polynucleotide
  source 1..155: mol_type = other RNA
gtctggctgtggtggggactggttttagagctagaaatagcaagttaaaataaggctagtccgttatcaacttgaaaaagtggcaccgagtcggtgcactgccacgcccaaggggtgttcactgctggcctccgcagtccccaccacattttttt

SEQ ID NO: 1480 - RNA, 155 nt, synthetic construct
  misc_feature 1..155: note = Description of Artificial Sequence: Synthetic polynucleotide
  source 1..155: mol_type = other RNA
gtctggctgtggtggggactggttttagagctagaaatagcaagttaaaataaggctagtccgttatcaacttgaaaaagtggcaccgagtcggtgctgccacgcccaaggggtgttcactgctggcctccgcagtccccaccacagcttttttt

SEQ ID NO: 1481 - RNA, 155 nt, synthetic construct
  misc_feature 1..155: note = Description of Artificial Sequence: Synthetic polynucleotide
  source 1..155: mol_type = other RNA
gtctggctgtggtggggactggttttagagctagaaatagcaagttaaaataaggctagtccgttatcaacttgaaaaagtggcaccgagtcggtgcgccacgcccaaggggtgttcactgctggcctccgcagtccccaccacagccttttttt

SEQ ID NO: 1482 - RNA, 155 nt, synthetic construct
  misc_feature 1..155: note = Description of Artificial Sequence: Synthetic polynucleotide
  source 1..155: mol_type = other RNA
gtctggctgtggtggggactggttttagagctagaaatagcaagttaaaataaggctagtccgttatcaacttgaaaaagtggcaccgagtcggtgctgccacgcccaaggggtgttcactgctggcctcagcagtccccaccacagcttttttt

SEQ ID NO: 1483 - RNA, 155 nt, synthetic construct
  misc_feature 1..155: note = Description of Artificial Sequence: Synthetic polynucleotide
  source 1..155: mol_type = other RNA
gtctggctgtggtggggactggttttagagctagaaatagcaagttaaaataaggctagtccgttatcaacttgaaaaagtggcaccgagtcggtgctgccacgcccaaggggtgttcactgctggcctcggcagtccccaccacagcttttttt

SEQ ID NO: 1484 - RNA, 155 nt, synthetic construct
  misc_feature 1..155: note = Description of Artificial Sequence: Synthetic polynucleotide
  source 1..155: mol_type = other RNA
gtctggctgtggtggggactggttttagagctagaaatagcaagttaaaataaggctagtccgttatcaacttgaaaaagtggcaccgagtcggtgcactgccacgcccaaggggtgttcactgctggcctcagcagtccccaccacattttttt

SEQ ID NO: 1485 - RNA, 156 nt, synthetic construct
  misc_feature 1..156: note = Description of Artificial Sequence: Synthetic polynucleotide
  source 1..156: mol_type = other RNA
gtctggctgtggtggggactggttttagagctagaaatagcaagttaaaataaggctagtccgttatcaacttgaaaaagtggcaccgagtcggtgctgccacgcccaaggggtgttcactgctggcctctgcagtccccaccacagccttttttt

SEQ ID NO: 1486 - RNA, 156 nt, synthetic construct
  misc_feature 1..156: note = Description of Artificial Sequence: Synthetic polynucleotide
  source 1..156: mol_type = other RNA
gtctggctgtggtggggactggttttagagctagaaatagcaagttaaaataaggctagtccgttatcaacttgaaaaagtggcaccgagtcggtgctgccacgcccaaggggtgttcactgctggcctcagcagtccccaccacagccttttttt

SEQ ID NO: 1487 - RNA, 156 nt, synthetic construct
  misc_feature 1..156: note = Description of Artificial Sequence: Synthetic polynucleotide
  source 1..156: mol_type = other RNA
gtctggctgtggtggggactggttttagagctagaaatagcaagttaaaataaggctagtccgttatcaacttgaaaaagtggcaccgagtcggtgcactgccacgcccaaggggtgttcactgctggcctcggcagtccccaccacagttttttt

SEQ ID NO: 1488 - RNA, 156 nt, synthetic construct
  misc_feature 1..156: note = Description of Artificial Sequence: Synthetic polynucleotide
  source 1..156: mol_type = other RNA
gtctggctgtggtggggactggttttagagctagaaatagcaagttaaaataaggctagtccgttatcaacttgaaaaagtggcaccgagtcggtgcactgccacgcccaaggggtgttcactgctggcctcagcagtccccaccacagttttttt

SEQ ID NO: 1489 - RNA, 156 nt, synthetic construct
  misc_feature 1..156: note = Description of Artificial Sequence: Synthetic polynucleotide
  source 1..156: mol_type = other RNA
gtctggctgtggtggggactggttttagagctagaaatagcaagttaaaataaggctagtccgttatcaacttgaaaaagtggcaccgagtcggtgcactgccacgcccaaggggtgttcactgctggcctccgcagtccccaccacagttttttt

SEQ ID NO: 1490 - RNA, 156 nt, synthetic construct
  misc_feature 1..156: note = Description of Artificial Sequence: Synthetic polynucleotide
  source 1..156: mol_type = other RNA
gtctggctgtggtggggactggttttagagctagaaatagcaagttaaaataaggctagtccgttatcaacttgaaaaagtggcaccgagtcggtgcactgccacgcccaaggggtgttcactgctggcctctgcagtccccaccacagttttttt

SEQ ID NO: 1491 - RNA, 156 nt, synthetic construct
  misc_feature 1..156: note = Description of Artificial Sequence: Synthetic polynucleotide
  source 1..156: mol_type = other RNA
gtctggctgtggtggggactggttttagagctagaaatagcaagttaaaataaggctagtccgttatcaacttgaaaaagtggcaccgagtcggtgctgccacgcccaaggggtgttcactgctggcctccgcagtccccaccacagccttttttt

SEQ ID NO: 1492 - RNA, 156 nt, synthetic construct
  misc_feature 1..156: note = Description of Artificial Sequence: Synthetic polynucleotide
  source 1..156: mol_type = other RNA
gtctggctgtggtggggactggttttagagctagaaatagcaagttaaaataaggctagtccgttatcaacttgaaaaagtggcaccgagtcggtgctgccacgcccaaggggtgttcactgctggcctcggcagtccccaccacagccttttttt

SEQ ID NO: 1493 - RNA, 157 nt, synthetic construct
  misc_feature 1..157: note = Description of Artificial Sequence: Synthetic polynucleotide
  source 1..157: mol_type = other RNA
gtctggctgtggtggggactggttttagagctagaaatagcaagttaaaataaggctagtccgttatcaacttgaaaaagtggcaccgagtcggtgcactgccacgcccaaggggtgttcactgctggcctcggcagtccccaccacagcttttttt

SEQ ID NO: 1494 - RNA, 157 nt, synthetic construct
  misc_feature 1..157: note = Description of Artificial Sequence: Synthetic polynucleotide
  source 1..157: mol_type = other RNA
gtctggctgtggtggggactggttttagagctagaaatagcaagttaaaataaggctagtccgttatcaacttgaaaaagtggcaccgagtcggtgcactgccacgcccaaggggtgttcactgctggcctccgcagtccccaccacagcttttttt

SEQ ID NO: 1495 - RNA, 157 nt, synthetic construct
  misc_feature 1..157: note = Description of Artificial Sequence: Synthetic polynucleotide
  source 1..157: mol_type = other RNA
gtctggctgtggtggggactggttttagagctagaaatagcaagttaaaataaggctagtccgttatcaacttgaaaaagtggcaccgagtcggtgcactgccacgcccaaggggtgttcactgctggcctctgcagtccccaccacagcttttttt

SEQ ID NO: 1496 - RNA, 157 nt, synthetic construct
  misc_feature 1..157: note = Description of Artificial Sequence: Synthetic polynucleotide
  source 1..157: mol_type = other RNA
gtctggctgtggtggggactggttttagagctagaaatagcaagttaaaataaggctagtccgttatcaacttgaaaaagtggcaccgagtcggtgcactgccacgcccaaggggtgttcactgctggcctcagcagtccccaccacagcttttttt

SEQ ID NO: 1497 - RNA, 158 nt, synthetic construct
  misc_feature 1..158: note = Description of Artificial Sequence: Synthetic polynucleotide
  source 1..158: mol_type = other RNA
gtctggctgtggtggggactggttttagagctagaaatagcaagttaaaataaggctagtccgttatcaacttgaaaaagtggcaccgagtcggtgcactgccacgcccaaggggtgttcactgctggcctctgcagtccccaccacagccttttttt

SEQ ID NO: 1498 - RNA, 158 nt, synthetic construct
  misc_feature 1..158: note = Description of Artificial Sequence: Synthetic polynucleotide
  source 1..158: mol_type = other RNA
gtctggctgtggtggggactggttttagagctagaaatagcaagttaaaataaggctagtccgttatcaacttgaaaaagtggcaccgagtcggtgcactgccacgcccaaggggtgttcactgctggcctcggcagtccccaccacagccttttttt

SEQ ID NO: 1499 - RNA, 158 nt, synthetic construct
  misc_feature 1..158: note = Description of Artificial Sequence: Synthetic polynucleotide
  source 1..158: mol_type = other RNA
gtctggctgtggtggggactggttttagagctagaaatagcaagttaaaataaggctagtccgttatcaacttgaaaaagtggcaccgagtcggtgcactgccacgcccaaggggtgttcactgctggcctccgcagtccccaccacagccttttttt

SEQ ID NO: 1500 - RNA, 158 nt, synthetic construct
  misc_feature 1..158: note = Description of Artificial Sequence: Synthetic polynucleotide
  source 1..158: mol_type = other RNA
gtctggctgtggtggggactggttttagagctagaaatagcaagttaaaataaggctagtccgttatcaacttgaaaaagtggcaccgagtcggtgcactgccacgcccaaggggtgttcactgctggcctcagcagtccccaccacagccttttttt

SEQ ID NO: 1501 - RNA, 96 nt, synthetic construct
  misc_feature 1..96: note = Description of Artificial Sequence: Synthetic oligonucleotide
  source 1..96: mol_type = other RNA
aggaataaaagagcattggcgttttagagctagaaatagcaagttaaaataaggctagtccgttatcaacttgaaaaagtggcaccgagtcggtgc

SEQ ID NO: 1502 - RNA, 96 nt, synthetic construct
  misc_feature 1..96: note = Description of Artificial Sequence: Synthetic oligonucleotide
  source 1..96: mol_type = other RNA
ggtgaggaataaaagagcatgttttagagctagaaatagcaagttaaaataaggctagtccgttatcaacttgaaaaagtggcaccgagtcggtgc

SEQ ID NO: 1503 - RNA, 96 nt, synthetic construct
  misc_feature 1..96: note = Description of Artificial Sequence: Synthetic oligonucleotide
  source 1..96: mol_type = other RNA
gaggaataaaagagcattgggttttagagctagaaatagcaagttaaaataaggctagtccgttatcaacttgaaaaagtggcaccgagtcggtgc

SEQ ID NO: 1504 - RNA, 97 nt, synthetic construct
  misc_feature 1..97: note = Description of Artificial Sequence: Synthetic oligonucleotide
  source 1..97: mol_type = other RNA
gaggaataaaagagcattggcgttttagagctagaaatagcaagttaaaataaggctagtccgttatcaacttgaaaaagtggcaccgagtcggtgc

SEQ ID NO: 1505 - RNA, 20 nt, synthetic construct
  misc_feature 1..20: note = Description of Artificial Sequence: Synthetic oligonucleotide
  source 1..20: mol_type = other RNA
ggctgtggtggggactgcgg

SEQ ID NO: 1506-1508 - skipped (3 entries)

SEQ ID NO: 1509 - RNA, 10 nt, synthetic construct
  misc_feature 1..10: note = Description of Artificial Sequence: Synthetic oligonucleotide
  source 1..10: mol_type = other RNA
cagtccccac

SEQ ID NO: 1510 - RNA, 11 nt, synthetic construct
  misc_feature 1..11: note = Description of Artificial Sequence: Synthetic oligonucleotide
  source 1..11: mol_type = other RNA
cagtccccacc

SEQ ID NO: 1511 - RNA, 12 nt, synthetic construct
  misc_feature 1..12: note = Description of Artificial Sequence: Synthetic oligonucleotide
  source 1..12: mol_type = other RNA
cagtccccacca

SEQ ID NO: 1512 - RNA, 13 nt, synthetic construct
  misc_feature 1..13: note = Description of Artificial Sequence: Synthetic oligonucleotide
  source 1..13: mol_type = other RNA
cagtccccaccac

SEQ ID NO: 1513 - RNA, 14 nt, synthetic construct
  misc_feature 1..14: note = Description of Artificial Sequence: Synthetic oligonucleotide
  source 1..14: mol_type = other RNA
cagtccccaccaca

SEQ ID NO: 1514 - RNA, 15 nt, synthetic construct
  misc_feature 1..15: note = Description of Artificial Sequence: Synthetic oligonucleotide
  source 1..15: mol_type = other RNA
cagtccccaccacag

SEQ ID NO: 1515 - RNA, 16 nt, synthetic construct
  misc_feature 1..16: note = Description of Artificial Sequence: Synthetic oligonucleotide
  source 1..16: mol_type = other RNA
cagtccccaccacagc

SEQ ID NO: 1516 - RNA, 17 nt, synthetic construct
  misc_feature 1..17: note = Description of Artificial Sequence: Synthetic oligonucleotide
  source 1..17: mol_type = other RNA
cagtccccaccacagcc

SEQ ID NO: 1517 - RNA, 21 nt, synthetic construct
  misc_feature 1..21: note = Description of Artificial Sequence: Synthetic oligonucleotide
  source 1..21: mol_type = other RNA
ggtgttcactgctggcttccg

SEQ ID NO: 1518 - RNA, 21 nt, synthetic construct
  misc_feature 1..21: note = Description of Artificial Sequence: Synthetic oligonucleotide
  source 1..21: mol_type = other RNA
ggtgttcactgctggcctccg

SEQ ID NO: 1519 - RNA, 22 nt, synthetic construct
  misc_feature 1..22: note = Description of Artificial Sequence: Synthetic oligonucleotide
  source 1..22: mol_type = other RNA
gggtgttcactgctggcctccg

SEQ ID NO: 1520 - RNA, 22 nt, synthetic construct
  misc_feature 1..22: note = Description of Artificial Sequence: Synthetic oligonucleotide
  source 1..22: mol_type = other RNA
gggtgttcactgctggcttccg

SEQ ID NO: 1521 - RNA, 23 nt, synthetic construct
  misc_feature 1..23: note = Description of Artificial Sequence: Synthetic oligonucleotide
  source 1..23: mol_type = other RNA
ggggtgttcactgctggcttccg

SEQ ID NO: 1522 - RNA, 23 nt, synthetic construct
  misc_feature 1..23: note = Description of Artificial Sequence: Synthetic oligonucleotide
  source 1..23: mol_type = other RNA
ggggtgttcactgctggcctccg

SEQ ID NO: 1523 - RNA, 24 nt, synthetic construct
  misc_feature 1..24: note = Description of Artificial Sequence: Synthetic oligonucleotide
  source 1..24: mol_type = other RNA
aggggtgttcactgctggcttccg

SEQ ID NO: 1524 - RNA, 24 nt, synthetic construct
  misc_feature 1..24: note = Description of Artificial Sequence: Synthetic oligonucleotide
  source 1..24: mol_type = other RNA
aggggtgttcactgctggcctccg

SEQ ID NO: 1525 - RNA, 25 nt, synthetic construct
  misc_feature 1..25: note = Description of Artificial Sequence: Synthetic oligonucleotide
  source 1..25: mol_type = other RNA
aaggggtgttcactgctggcttccg

SEQ ID NO: 1526 - RNA, 25 nt, synthetic construct
  misc_feature 1..25: note = Description of Artificial Sequence: Synthetic oligonucleotide
  source 1..25: mol_type = other RNA
aaggggtgttcactgctggcctccg

SEQ ID NO: 1527 - RNA, 26 nt, synthetic construct
  misc_feature 1..26: note = Description of Artificial Sequence: Synthetic oligonucleotide
  source 1..26: mol_type = other RNA
caaggggtgttcactgctggcctccg

SEQ ID NO: 1528 - RNA, 27 nt, synthetic construct
  misc_feature 1..27: note = Description of Artificial Sequence: Synthetic oligonucleotide
  source 1..27: mol_type = other RNA
ccaaggggtgttcactgctggcctccg

SEQ ID NO: 1529 - RNA, 28 nt, synthetic construct
  misc_feature 1..28: note = Description of Artificial Sequence: Synthetic oligonucleotide
  source 1..28: mol_type = other RNA
cccaaggggtgttcactgctggcctccg

SEQ ID NO: 1530 - RNA, 29 nt, synthetic construct
  misc_feature 1..29: note = Description of Artificial Sequence: Synthetic oligonucleotide
  source 1..29: mol_type = other RNA
gcccaaggggtgttcactgctggcttccg

SEQ ID NO: 1531 - RNA, 29 nt, synthetic construct
  misc_feature 1..29: note = Description of Artificial Sequence: Synthetic oligonucleotide
  source 1..29: mol_type = other RNA
gcccaaggggtgttcactgctggcctccg

SEQ ID NO: 1532 - RNA, 30 nt, synthetic construct
  misc_feature 1..30: note = Description of Artificial Sequence: Synthetic oligonucleotide
  source 1..30: mol_type = other RNA
cgcccaaggggtgttcactgctggcctccg

SEQ ID NO: 1533 - RNA, 31 nt, synthetic construct
  misc_feature 1..31: note = Description of Artificial Sequence: Synthetic oligonucleotide
  source 1..31: mol_type = other RNA
acgcccaaggggtgttcactgctggcctccg

SEQ ID NO: 1534 - RNA, 31 nt, synthetic construct
  misc_feature 1..31: note = Description of Artificial Sequence: Synthetic oligonucleotide
  source 1..31: mol_type = other RNA
acgcccaaggggtgttcactgctggcttccg

SEQ ID NO: 1535 - RNA, 34 nt, synthetic construct
  misc_feature 1..34: note = Description of Artificial Sequence: Synthetic oligonucleotide
  source 1..34: mol_type = other RNA
gccacgcccaaggggtgttcactgctggcctccg

SEQ ID NO: 1536 - RNA, 34 nt, synthetic construct
  misc_feature 1..34: note = Description of Artificial Sequence: Synthetic oligonucleotide
  source 1..34: mol_type = other RNA
gccacgcccaaggggtgttcactgctggcttccg

SEQ ID NO: 1537 - RNA, 35 nt, synthetic construct
  misc_feature 1..35: note = Description of Artificial Sequence: Synthetic oligonucleotide
  source 1..35: mol_type = other RNA
tgccacgcccaaggggtgttcactgctggcttccg

SEQ ID NO: 1538 - RNA, 35 nt, synthetic construct
  misc_feature 1..35: note = Description of Artificial Sequence: Synthetic oligonucleotide
  source 1..35: mol_type = other RNA
tgccacgcccaaggggtgttcactgctggcctccg

SEQ ID NO: 1539 - RNA, 37 nt, synthetic construct
  misc_feature 1..37: note = Description of Artificial Sequence: Synthetic oligonucleotide
  source 1..37: mol_type = other RNA
actgccacgcccaaggggtgttcactgctggcctccg

SEQ ID NO: 1540 - RNA, 37 nt, synthetic construct
  misc_feature 1..37: note = Description of Artificial Sequence: Synthetic oligonucleotide
  source 1..37: mol_type = other RNA
actgccacgcccaaggggtgttcactgctggcttccg

SEQ ID NO: 1541 - RNA, 38 nt, synthetic construct
  misc_feature 1..38: note = Description of Artificial Sequence: Synthetic oligonucleotide
  source 1..38: mol_type = other RNA
gactgccacgcccaaggggtgttcactgctggcctccg

SEQ ID NO: 1542 - RNA, 38 nt, synthetic construct
  misc_feature 1..38: note = Description of Artificial Sequence: Synthetic oligonucleotide
  source 1..38: mol_type = other RNA
gactgccacgcccaaggggtgttcactgctggcttccg

SEQ ID NO: 1543 - RNA, 39 nt, synthetic construct
  misc_feature 1..39: note = Description of Artificial Sequence: Synthetic oligonucleotide
  source 1..39: mol_type = other RNA
tgactgccacgcccaaggggtgttcactgctggcttccg

SEQ ID NO: 1544 - RNA, 39 nt, synthetic construct
  misc_feature 1..39: note = Description of Artificial Sequence: Synthetic oligonucleotide
  source 1..39: mol_type = other RNA
tgactgccacgcccaaggggtgttcactgctggcctccg

SEQ ID NO: 1545 - RNA, 40 nt, synthetic construct
  misc_feature 1..40: note = Description of Artificial Sequence: Synthetic oligonucleotide
  source 1..40: mol_type = other RNA
gtgactgccacgcccaaggggtgttcactgctggcctccg

SEQ ID NO: 1546 - RNA, 40 nt, synthetic construct
  misc_feature 1..40: note = Description of Artificial Sequence: Synthetic oligonucleotide
  source 1..40: mol_type = other RNA
gtgactgccacgcccaaggggtgttcactgctggcttccg

SEQ ID NO: 1547 - RNA, 124 nt, synthetic construct
  misc_feature 1..124: note = Description of Artificial Sequence: Synthetic polynucleotide
  source 1..124: mol_type = other RNA
ggctgtggtggggactgcgggttttagagctagaaatagcaagttaaaataaggctagtccgttatcaacttgaaaaagtggcaccgagtcggtgcggtgttcactgctggcctccgcagtccc

SEQ ID NO: 1548 - RNA, 124 nt, synthetic construct
  misc_feature 1..124: note = Description of Artificial Sequence: Synthetic polynucleotide
  source 1..124: mol_type = other RNA
ggctgtggtggggactgcgggttttagagctagaaatagcaagttaaaataaggctagtccgttatcaacttgaaaaagtggcaccgagtcggtgcggtgttcactgctggcttccgcagtccc

SEQ ID NO: 1549 - RNA, 125 nt, synthetic construct
  misc_feature 1..125: note = Description of Artificial Sequence: Synthetic polynucleotide
  source 1..125: mol_type = other RNA
ggctgtggtggggactgcgggttttagagctagaaatagcaagttaaaataaggctagtccgttatcaacttgaaaaagtggcaccgagtcggtgcgggtgttcactgctggcctccgcagtccc

SEQ ID NO: 1550 - RNA, 125 nt, synthetic construct
  misc_feature 1..125: note = Description of Artificial Sequence: Synthetic polynucleotide
  source 1..125: mol_type = other RNA
ggctgtggtggggactgcgggttttagagctagaaatagcaagttaaaataaggctagtccgttatcaacttgaaaaagtggcaccgagtcggtgcggtgttcactgctggcctccgcagtcccc

SEQ ID NO: 1551 - RNA, 125 nt, synthetic construct
  misc_feature 1..125: note = Description of Artificial Sequence: Synthetic polynucleotide
  source 1..125: mol_type = other RNA
ggctgtggtggggactgcgggttttagagctagaaatagcaagttaaaataaggctagtccgttatcaacttgaaaaagtggcaccgagtcggtgcggtgttcactgctggcttccgcagtcccc

SEQ ID NO: 1552 - RNA, 125 nt, synthetic construct
  misc_feature 1..125: note = Description of Artificial Sequence: Synthetic polynucleotide
  source 1..125: mol_type = other RNA
ggctgtggtggggactgcgggttttagagctagaaatagcaagttaaaataaggctagtccgttatcaacttgaaaaagtggcaccgagtcggtgcgggtgttcactgctggcttccgcagtccc

SEQ ID NO: 1553 - RNA, 126 nt, synthetic construct
  misc_feature 1..126: note = Description of Artificial Sequence: Synthetic polynucleotide
  source 1..126: mol_type = other RNA
ggctgtggtggggactgcgggttttagagctagaaatagcaagttaaaataaggctagtccgttatcaacttgaaaaagtggcaccgagtcggtgcgggtgttcactgctggcttccgcagtcccc

SEQ ID NO: 1554 - RNA, 126 nt, synthetic construct
  misc_feature 1..126: note = Description of Artificial Sequence: Synthetic polynucleotide
  source 1..126: mol_type = other RNA
ggctgtggtggggactgcgggttttagagctagaaatagcaagttaaaataaggctagtccgttatcaacttgaaaaagtggcaccgagtcggtgcgggtgttcactgctggcctccgcagtcccc

SEQ ID NO: 1555 - RNA, 126 nt, synthetic construct
  misc_feature 1..126: note = Description of Artificial Sequence: Synthetic polynucleotide
  source 1..126: mol_type = other RNA
ggctgtggtggggactgcgggttttagagctagaaatagcaagttaaaataaggctagtccgttatcaacttgaaaaagtggcaccgagtcggtgcggggtgttcactgctggcttccgcagtccc

SEQ ID NO: 1556 - RNA, 126 nt, synthetic construct
  misc_feature 1..126: note = Description of Artificial Sequence: Synthetic polynucleotide
  source 1..126: mol_type = other RNA
ggctgtggtggggactgcgggttttagagctagaaatagcaagttaaaataaggctagtccgttatcaacttgaaaaagtggcaccgagtcggtgcggtgttcactgctggcctccgcagtcccca

SEQ ID NO: 1557 - RNA, 126 nt, synthetic construct
  misc_feature 1..126: note = Description of Artificial Sequence: Synthetic polynucleotide
  source 1..126: mol_type = other RNA
ggctgtggtggggactgcgggttttagagctagaaatagcaagttaaaataaggctagtccgttatcaacttgaaaaagtggcaccgagtcggtgcggtgttcactgctggcttccgcagtcccca

SEQ ID NO: 1558 - RNA, 126 nt, synthetic construct
  misc_feature 1..126: note = Description of Artificial Sequence: Synthetic polynucleotide
  source 1..126: mol_type = other RNA
ggctgtggtggggactgcgggttttagagctagaaatagcaagttaaaataaggctagtccgttatcaacttgaaaaagtggcaccgagtcggtgcggggtgttcactgctggcctccgcagtccc

SEQ ID NO: 1559 - RNA, 127 nt, synthetic construct
  misc_feature 1..127: note = Description of Artificial Sequence: Synthetic polynucleotide
  source 1..127: mol_type = other RNA
ggctgtggtggggactgcgggttttagagctagaaatagcaagttaaaataaggctagtccgttatcaacttgaaaaagtggcaccgagtcggtgcgggtgttcactgctggcctccgcagtcccca

SEQ ID NO: 1560 - RNA, 127 nt, synthetic construct
  misc_feature 1..127: note = Description of Artificial Sequence: Synthetic polynucleotide
  source 1..127: mol_type = other RNA
ggctgtggtggggactgcgggttttagagctagaaatagcaagttaaaataaggctagtccgttatcaacttgaaaaagtggcaccgagtcggtgcgggtgttcactgctggcttccgcagtcccca

SEQ ID NO: 1561 - RNA, 127 nt, synthetic construct
  misc_feature 1..127: note = Description of Artificial Sequence: Synthetic polynucleotide
  source 1..127: mol_type = other RNA
ggctgtggtggggactgcgggttttagagctagaaatagcaagttaaaataaggctagtccgttatcaacttgaaaaagtggcaccgagtcggtgcaggggtgttcactgctggcctccgcagtccc

SEQ ID NO: 1562 - RNA, 127 nt, synthetic construct
  misc_feature 1..127: note = Description of Artificial Sequence: Synthetic polynucleotide
  source 1..127: mol_type = other RNA
ggctgtggtggggactgcgggttttagagctagaaatagcaagttaaaataaggctagtccgttatcaacttgaaaaagtggcaccgagtcggtgcggggtgttcactgctggcctccgcagtcccc

SEQ ID NO: 1563 - RNA, 127 nt, synthetic construct
  misc_feature 1..127: note = Description of Artificial Sequence: Synthetic polynucleotide
  source 1..127: mol_type = other RNA
ggctgtggtggggactgcgggttttagagctagaaatagcaagttaaaataaggctagtccgttatcaacttgaaaaagtggcaccgagtcggtgcaggggtgttcactgctggcttccgcagtccc

SEQ ID NO: 1564 - RNA, 127 nt, synthetic construct
  misc_feature 1..127: note = Description of Artificial Sequence: Synthetic polynucleotide
  source 1..127: mol_type = other RNA
ggctgtggtggggactgcgggttttagagctagaaatagcaagttaaaataaggctagtccgttatcaacttgaaaaagtggcaccgagtcggtgcggtgttcactgctggcttccgcagtccccac

SEQ ID NO: 1565 - RNA, 127 nt, synthetic construct
  misc_feature 1..127: note = Description of Artificial Sequence: Synthetic polynucleotide
  source 1..127: mol_type = other RNA
ggctgtggtggggactgcgggttttagagctagaaatagcaagttaaaataaggctagtccgttatcaacttgaaaaagtggcaccgagtcggtgcggtgttcactgctggcctccgcagtccccac

SEQ ID NO: 1566 - RNA, 127 nt, synthetic construct
  misc_feature 1..127: note = Description of Artificial Sequence: Synthetic polynucleotide
  source 1..127: mol_type = other RNA
ggctgtggtggggactgcgggttttagagctagaaatagcaagttaaaataaggctagtccgttatcaacttgaaaaagtggcaccgagtcggtgcggggtgttcactgctggcttccgcagtcccc

SEQ ID NO: 1567 - RNA, 128 nt, synthetic construct
  misc_feature 1..128: note = Description of Artificial Sequence: Synthetic polynucleotide
  source 1..128: mol_type = other RNA
ggctgtggtggggactgcgggttttagagctagaaatagcaagttaaaataaggctagtccgttatcaacttgaaaaagtggcaccgagtcggtgcaggggtgttcactgctggcttccgcagtcccc

SEQ ID NO: 1568 - RNA, 128 nt, synthetic construct
  misc_feature 1..128: note = Description of Artificial Sequence: Synthetic polynucleotide
  source 1..128: mol_type = other RNA
ggctgtggtggggactgcgggttttagagctagaaatagcaagttaaaataaggctagtccgttatcaacttgaaaaagtggcaccgagtcggtgcaaggggtgttcactgctggcttccgcagtccc

SEQ ID NO: 1569 - RNA, 128 nt, synthetic construct
  misc_feature 1..128: note = Description of Artificial Sequence: Synthetic polynucleotide
  source 1..128: mol_type = other RNA
ggctgtggtggggactgcgggttttagagctagaaatagcaagttaaaataaggctagtccgttatcaacttgaaaaagtggcaccgagtcggtgcgggtgttcactgctggcctccgcagtccccac

SEQ ID NO: 1570 - RNA, 128 nt, synthetic construct
  misc_feature 1..128: note = Description of Artificial Sequence: Synthetic polynucleotide
  source 1..128: mol_type = other RNA
ggctgtggtggggactgcgggttttagagctagaaatagcaagttaaaataaggctagtccgttatcaacttgaaaaagtggcaccgagtcggtgcaggggtgttcactgctggcctccgcagtcccc

SEQ ID NO: 1571 - RNA, 128 nt, synthetic construct
  misc_feature 1..128: note = Description of Artificial Sequence: Synthetic polynucleotide
  source 1..128: mol_type = other RNA
ggctgtggtggggactgcgggttttagagctagaaatagcaagttaaaataaggctagtccgttatcaacttgaaaaagtggcaccgagtcggtgcggggtgttcactgctggcttccgcagtcccca

SEQ ID NO: 1572 - RNA, 128 nt, synthetic construct
  misc_feature 1..128: note = Description of Artificial Sequence: Synthetic polynucleotide
  source 1..128: mol_type = other RNA
ggctgtggtggggactgcgggttttagagctagaaatagcaagttaaaataaggctagtccgttatcaacttgaaaaagtggcaccgagtcggtgcggtgttcactgctggcttccgcagtccccacc

SEQ ID NO: 1573 - RNA, 128 nt, synthetic construct
  misc_feature 1..128: note = Description of Artificial Sequence: Synthetic polynucleotide
  source 1..128: mol_type = other RNA
ggctgtggtggggactgcgggttttagagctagaaatagcaagttaaaataaggctagtccgttatcaacttgaaaaagtggcaccgagtcggtgcggggtgttcactgctggcctccgcagtcccca

SEQ ID NO: 1574 - RNA, 128 nt, synthetic construct
  misc_feature 1..128: note = Description of Artificial Sequence: Synthetic polynucleotide
  source 1..128: mol_type = other RNA
ggctgtggtggggactgcgggttttagagctagaaatagcaagttaaaataaggctagtccgttatcaacttgaaaaagtggcaccgagtcggtgcggtgttcactgctggcctccgcagtccccacc

SEQ ID NO: 1575 - RNA, 128 nt, synthetic construct
  misc_feature 1..128: note = Description of Artificial Sequence: Synthetic polynucleotide
  source 1..128: mol_type = other RNA
ggctgtggtggggactgcgggttttagagctagaaatagcaagttaaaataaggctagtccgttatcaacttgaaaaagtggcaccgagtcggtgcgggtgttcactgctggcttccgcagtccccac

SEQ ID NO: 1576 - RNA, 128 nt, synthetic construct
  misc_feature 1..128: note = Description of Artificial Sequence: Synthetic polynucleotide
  source 1..128: mol_type = other RNA
ggctgtggtggggactgcgggttttagagctagaaatagcaagttaaaataaggctagtccgttatcaacttgaaaaagtggcaccgagtcggtgcaaggggtgttcactgctggcctccgcagtccc

SEQ ID NO: 1577 - RNA, 129 nt, synthetic construct
  misc_feature 1..129: note = Description of Artificial Sequence: Synthetic polynucleotide
  source 1..129: mol_type = other RNA
ggctgtggtggggactgcgggttttagagctagaaatagcaagttaaaataaggctagtccgttatcaacttgaaaaagtggcaccgagtcggtgcggggtgttcactgctggcttccgcagtccccac

SEQ ID NO: 1578 - RNA, 129 nt, synthetic construct
  misc_feature 1..129: note = Description of Artificial Sequence: Synthetic polynucleotide
  source 1..129: mol_type = other RNA
ggctgtggtggggactgcgggttttagagctagaaatagcaagttaaaataaggctagtccgttatcaacttgaaaaagtggcaccgagtcggtgcggtgttcactgctggcctccgcagtccccacca

SEQ ID NO: 1579 - RNA, 129 nt, synthetic construct
  misc_feature 1..129: note = Description of Artificial Sequence: Synthetic polynucleotide
  source 1..129: mol_type = other RNA
ggctgtggtggggactgcgggttttagagctagaaatagcaagttaaaataaggctagtccgttatcaacttgaaaaagtggcaccgagtcggtgcgggtgttcactgctggcctccgcagtccccacc

SEQ ID NO: 1580 - RNA, 129 nt, synthetic construct
  misc_feature 1..129: note = Description of Artificial Sequence: Synthetic polynucleotide
  source 1..129: mol_type = other RNA
ggctgtggtggggactgcgggttttagagctagaaatagcaagttaaaataaggctagtccgttatcaacttgaaaaagtggcaccgagtcggtgcggggtgttcactgctggcctccgcagtccccac

SEQ ID NO: 1581 - RNA, 129 nt, synthetic construct
  misc_feature 1..129: note = Description of Artificial Sequence: Synthetic polynucleotide
  source 1..129: mol_type = other RNA
ggctgtggtggggactgcgggttttagagctagaaatagcaagttaaaataaggctagtccgttatcaacttgaaaaagtggcaccgagtcggtgcaggggtgttcactgctggcttccgcagtcccca

SEQ ID NO: 1582 - RNA, 129 nt, synthetic construct
  misc_feature 1..129: note = Description of Artificial Sequence: Synthetic polynucleotide
  source 1..129: mol_type = other RNA
ggctgtggtggggactgcgggttttagagctagaaatagcaagttaaaataaggctagtccgttatcaacttgaaaaagtggcaccgagtcggtgcaggggtgttcactgctggcctccgcagtcccca

SEQ ID NO: 1583 - RNA, 129 nt, synthetic construct
  misc_feature 1..129: note = Description of Artificial Sequence: Synthetic polynucleotide
  source 1..129: mol_type = other RNA
ggctgtggtggggactgcgggttttagagctagaaatagcaagttaaaataaggctagtccgttatcaacttgaaaaagtggcaccgagtcggtgcaaggggtgttcactgctggcctccgcagtcccc

SEQ ID NO: 1584 - RNA, 129 nt, synthetic construct
  misc_feature 1..129: note = Description of Artificial Sequence: Synthetic polynucleotide
  source 1..129: mol_type = other RNA
ggctgtggtggggactgcgggttttagagctagaaatagcaagttaaaataaggctagtccgttatcaacttgaaaaagtggcaccgagtcggtgcaaggggtgttcactgctggcttccgcagtcccc

SEQ ID NO: 1585 - RNA, 129 nt, synthetic construct
  misc_feature 1..129: note = Description of Artificial Sequence: Synthetic polynucleotide
  source 1..129: mol_type = other RNA
ggctgtggtggggactgcgggttttagagctagaaatagcaagttaaaataaggctagtccgttatcaacttgaaaaagtggcaccgagtcggtgcgggtgttcactgctggcttccgcagtccccacc

SEQ ID NO: 1586 - RNA, 129 nt, synthetic construct
  misc_feature 1..129: note = Description of Artificial Sequence: Synthetic polynucleotide
  source 1..129: mol_type = other RNA
ggctgtggtggggactgcgggttttagagctagaaatagcaagttaaaataaggctagtccgttatcaacttgaaaaagtggcaccgagtcggtgcggtgttcactgctggcttccgcagtccccacca

SEQ ID NO: 1587 - RNA, 130 nt, synthetic construct
  misc_feature 1..130: note = Description of Artificial Sequence: Synthetic polynucleotide
  source 1..130: mol_type = other RNA
ggctgtggtggggactgcgggttttagagctagaaatagcaagttaaaataaggctagtccgttatcaacttgaaaaagtggcaccgagtcggtgcgggtgttcactgctggcttccgcagtccccacca

SEQ ID NO: 1588 - RNA, 130 nt, synthetic construct
  misc_feature 1..130: note = Description of Artificial Sequence: Synthetic polynucleotide
  source 1..130: mol_type = other RNA
ggctgtggtggggactgcgggttttagagctagaaatagcaagttaaaataaggctagtccgttatcaacttgaaaaagtggcaccgagtcggtgcaaggggtgttcactgctggcctccgcagtcccca

SEQ ID NO: 1589 - RNA, 130 nt, synthetic construct
  misc_feature 1..130: note = Description of Artificial Sequence: Synthetic polynucleotide
  source 1..130: mol_type = other RNA
ggctgtggtggggactgcgggttttagagctagaaatagcaagttaaaataaggctagtccgttatcaacttgaaaaagtggcaccgagtcggtgcggtgttcactgctggcttccgcagtccccaccac

SEQ ID NO: 1590 - RNA, 130 nt, synthetic construct
  misc_feature 1..130: note = Description of Artificial Sequence: Synthetic polynucleotide
  source 1..130: mol_type = other RNA
ggctgtggtggggactgcgggttttagagctagaaatagcaagttaaaataaggctagtccgttatcaacttgaaaaagtggcaccgagtcggtgcaggggtgttcactgctggcttccgcagtccccac

SEQ ID NO: 1591 - RNA, 130 nt, synthetic construct
  misc_feature 1..130: note = Description of Artificial Sequence: Synthetic polynucleotide
  source 1..130: mol_type = other RNA
ggctgtggtggggactgcgggttttagagctagaaatagcaagttaaaataaggctagtccgttatcaacttgaaaaagtggcaccgagtcggtgcgggtgttcactgctggcctccgcagtccccacca

SEQ ID NO: 1592 - RNA, 130 nt, synthetic construct
  misc_feature 1..130: note = Description of Artificial Sequence: Synthetic polynucleotide
  source 1..130: mol_type = other RNA
ggctgtggtggggactgcgggttttagagctagaaatagcaagttaaaataaggctagtccgttatcaacttgaaaaagtggcaccgagtcggtgcggtgttcactgctggcctccgcagtccccaccac

SEQ ID NO: 1593 - RNA, 130 nt, synthetic construct
  misc_feature 1..130: note = Description of Artificial Sequence: Synthetic polynucleotide
  source 1..130: mol_type = other RNA
ggctgtggtggggactgcgggttttagagctagaaatagcaagttaaaataaggctagtccgttatcaacttgaaaaagtggcaccgagtcggtgcaggggtgttcactgctggcctccgcagtccccac

SEQ ID NO: 1594 - RNA, 130 nt, synthetic construct
  misc_feature 1..130: note = Description of Artificial Sequence: Synthetic polynucleotide
  source 1..130: mol_type = other RNA
ggctgtggtggggactgcgggttttagagctagaaatagcaagttaaaataaggctagtccgttatcaacttgaaaaagtggcaccgagtcggtgcaaggggtgttcactgctggcttccgcagtcccca

SEQ ID NO: 1595 - RNA, 130 nt, synthetic construct
  misc_feature 1..130: note = Description of Artificial Sequence: Synthetic polynucleotide
  source 1..130: mol_type = other RNA
ggctgtggtggggactgcgggttttagagctagaaatagcaagttaaaataaggctagtccgttatcaacttgaaaaagtggcaccgagtcggtgcggggtgttcactgctggcttccgcagtccccacc

SEQ ID NO: 1596 - RNA, 130 nt, synthetic construct
  misc_feature 1..130: note = Description of Artificial Sequence: Synthetic polynucleotide
  source 1..130: mol_type = other RNA
ggctgtggtggggactgcgggttttagagctagaaatagcaagttaaaataaggctagtccgttatcaacttgaaaaagtggcaccgagtcggtgcggggtgttcactgctggcctccgcagtccccacc

SEQ ID NO: 1597 - RNA, 131 nt, synthetic construct
  misc_feature 1..131: note = Description of Artificial Sequence: Synthetic polynucleotide
  source 1..131: mol_type = other RNA
ggctgtggtggggactgcgggttttagagctagaaatagcaagttaaaataaggctagtccgttatcaacttgaaaaagtggcaccgagtcggtgcggtgttcactgctggcttccgcagtcccctttttt

SEQ ID NO: 1598 - RNA, 131 nt, synthetic construct
  misc_feature 1..131: note = Description of Artificial Sequence: Synthetic polynucleotide
  source 1..131: mol_type = other RNA
ggctgtggtggggactgcgggttttagagctagaaatagcaagttaaaataaggctagtccgttatcaacttgaaaaagtggcaccgagtcggtgcaaggggtgttcactgctggcttccgcagtccccac

SEQ ID NO: 1599 - RNA, 131 nt, synthetic construct
  misc_feature 1..131: note = Description of Artificial Sequence: Synthetic polynucleotide
  source 1..131: mol_type = other RNA
ggctgtggtggggactgcgggttttagagctagaaatagcaagttaaaataaggctagtccgttatcaacttgaaaaagtggcaccgagtcggtgcggtgttcactgctggcctccgcagtcccctttttt

SEQ ID NO: 1600 - RNA, 131 nt, synthetic construct
  misc_feature 1..131: note = Description of Artificial Sequence: Synthetic polynucleotide
  source 1..131: mol_type = other RNA
ggctgtggtggggactgcgggttttagagctagaaatagcaagttaaaataaggctagtccgttatcaacttgaaaaagtggcaccgagtcggtgcaaggggtgttcactgctggcctccgcagtccccac

SEQ ID NO: 1601 - RNA, 131 nt, synthetic construct
  misc_feature 1..131: note = Description of Artificial Sequence: Synthetic polynucleotide
  source 1..131: mol_type = other RNA
ggctgtggtggggactgcgggttttagagctagaaatagcaagttaaaataaggctagtccgttatcaacttgaaaaagtggcaccgagtcggtgcaggggtgttcactgctggcttccgcagtccccacc

SEQ ID NO: 1602 - RNA, 131 nt, synthetic construct
  misc_feature 1..131: note = Description of Artificial Sequence: Synthetic polynucleotide
  source 1..131: mol_type = other RNA
ggctgtggtggggactgcgggttttagagctagaaatagcaagttaaaataaggctagtccgttatcaacttgaaaaagtggcaccgagtcggtgcggtgttcactgctggcctccgcagtccccaccaca

SEQ ID NO: 1603 - RNA, 131 nt, synthetic construct
  misc_feature 1..131: note = Description of Artificial Sequence: Synthetic polynucleotide
  source 1..131: mol_type = other RNA
ggctgtggtggggactgcgggttttagagctagaaatagcaagttaaaataaggctagtccgttatcaacttgaaaaagtggcaccgagtcggtgcggtgttcactgctggcttccgcagtcccttttttt

SEQ ID NO: 1604 - RNA, 131 nt, synthetic construct
  misc_feature 1..131: note = Description of Artificial Sequence: Synthetic polynucleotide
  source 1..131: mol_type = other RNA
ggctgtggtggggactgcgggttttagagctagaaatagcaagttaaaataaggctagtccgttatcaacttgaaaaagtggcaccgagtcggtgcaggggtgttcactgctggcctccgcagtccccacc

SEQ ID NO: 1605 - RNA, 131 nt, synthetic construct
  misc_feature 1..131: note = Description of Artificial Sequence: Synthetic polynucleotide
  source 1..131: mol_type = other RNA
ggctgtggtggggactgcgggttttagagctagaaatagcaagttaaaataaggctagtccgttatcaacttgaaaaagtggcaccgagtcggtgcggtgttcactgctggcctccgcagtcccttttttt

SEQ ID NO: 1606 - RNA, 131 nt, synthetic construct
  misc_feature 1..131: note = Description of Artificial Sequence: Synthetic polynucleotide
  source 1..131: mol_type = other RNA
ggctgtggtggggactgcgggttttagagctagaaatagcaagttaaaataaggctagtccgttatcaacttgaaaaagtggcaccgagtcggtgcggtgttcactgctggcttccgcagtccccaccaca

SEQ ID NO: 1607 - RNA, 131 nt, synthetic construct
  misc_feature 1..131: note = Description of Artificial Sequence: Synthetic polynucleotide
  source 1..131: mol_type = other RNA
ggctgtggtggggactgcgggttttagagctagaaatagcaagttaaaataaggctagtccgttatcaacttgaaaaagtggcaccgagtcggtgcggggtgttcactgctggcttccgcagtccccacca

SEQ ID NO: 1608 - RNA, 131 nt, synthetic construct
  misc_feature 1..131: note = Description of Artificial Sequence: Synthetic polynucleotide
  source 1..131: mol_type = other RNA
ggctgtggtggggactgcgggttttagagctagaaatagcaagttaaaataaggctagtccgttatcaacttgaaaaagtggcaccgagtcggtgcgggtgttcactgctggcttccgcagtccccaccac

SEQ ID NO: 1609 - RNA, 131 nt, synthetic construct
  misc_feature 1..131: note = Description of Artificial Sequence: Synthetic polynucleotide
  source 1..131: mol_type = other RNA
ggctgtggtggggactgcgggttttagagctagaaatagcaagttaaaataaggctagtccgttatcaacttgaaaaagtggcaccgagtcggtgcggggtgttcactgctggcctccgcagtccccacca

SEQ ID NO: 1610 - RNA, 131 nt, synthetic construct
  misc_feature 1..131: note = Description of Artificial Sequence: Synthetic polynucleotide
  source 1..131: mol_type = other RNA
ggctgtggtggggactgcgggttttagagctagaaatagcaagttaaaataaggctagtccgttatcaacttgaaaaagtggcaccgagtcggtgcgggtgttcactgctggcctccgcagtccccaccac

SEQ ID NO: 1611 - RNA, 132 nt, synthetic construct
  misc_feature 1..132: note = Description of Artificial Sequence: Synthetic polynucleotide
  source 1..132: mol_type = other RNA
ggctgtggtggggactgcgggttttagagctagaaatagcaagttaaaataaggctagtccgttatcaacttgaaaaagtggcaccgagtcggtgcgggtgttcactgctggcttccgcagtcccttttttt

SEQ ID NO: 1612 - RNA, 132 nt, synthetic construct
  misc_feature 1..132: note = Description of Artificial Sequence: Synthetic polynucleotide
  source 1..132: mol_type = other RNA
ggctgtggtggggactgcgggttttagagctagaaatagcaagttaaaataaggctagtccgttatcaacttgaaaaagtggcaccgagtcggtgcgggtgttcactgctggcctccgcagtcccttttttt

SEQ ID NO: 1613 - RNA, 132 nt, synthetic construct
  misc_feature 1..132: note = Description of Artificial Sequence: Synthetic polynucleotide
  source 1..132: mol_type = other RNA
ggctgtggtggggactgcgggttttagagctagaaatagcaagttaaaataaggctagtccgttatcaacttgaaaaagtggcaccgagtcggtgcggtgttcactgctggcctccgcagtccccttttttt

SEQ ID NO: 1614 - RNA, 132 nt, synthetic construct
  misc_feature 1..132: note = Description of Artificial Sequence: Synthetic polynucleotide
  source 1..132: mol_type = other RNA
ggctgtggtggggactgcgggttttagagctagaaatagcaagttaaaataaggctagtccgttatcaacttgaaaaagtggcaccgagtcggtgcgcccaaggggtgttcactgctggcctccgcagtccc

SEQ ID NO: 1615 - RNA, 132 nt, synthetic construct
  misc_feature 1..132: note = Description of Artificial Sequence: Synthetic polynucleotide
  source 1..132: mol_type = other RNA
ggctgtggtggggactgcgggttttagagctagaaatagcaagttaaaataaggctagtccgttatcaacttgaaaaagtggcaccgagtcggtgcgggtgttcactgctggcttccgcagtccccaccaca

SEQ ID NO: 1616 - RNA, 132 nt, synthetic construct
  misc_feature 1..132: note = Description of Artificial Sequence: Synthetic polynucleotide
  source 1..132: mol_type = other RNA
ggctgtggtggggactgcgggttttagagctagaaatagcaagttaaaataaggctagtccgttatcaacttgaaaaagtggcaccgagtcggtgcaggggtgttcactgctggcctccgcagtccccacca

SEQ ID NO: 1617 - RNA, 132 nt, synthetic construct
  misc_feature 1..132: note = Description of Artificial Sequence: Synthetic polynucleotide
  source 1..132: mol_type = other RNA
ggctgtggtggggactgcgggttttagagctagaaatagcaagttaaaataaggctagtccgttatcaacttgaaaaagtggcaccgagtcggtgcgggtgttcactgctggcctccgcagtcccctttttt

SEQ ID NO: 1618 - RNA, 132 nt, synthetic construct
  misc_feature 1..132: note = Description of Artificial Sequence: Synthetic polynucleotide
  source 1..132: mol_type = other RNA
ggctgtggtggggactgcgggttttagagctagaaatagcaagttaaaataaggctagtccgttatcaacttgaaaaagtggcaccgagtcggtgcggtgttcactgctggcttccgcagtccccttttttt

SEQ ID NO: 1619 - RNA, 132 nt, synthetic construct
  misc_feature 1..132: note = Description of Artificial Sequence: Synthetic polynucleotide
  source 1..132: mol_type = other RNA
ggctgtggtggggactgcgggttttagagctagaaatagcaagttaaaataaggctagtccgttatcaacttgaaaaagtggcaccgagtcggtgcaaggggtgttcactgctggcttccgcagtccccacc

SEQ ID NO: 1620 - RNA, 132 nt, synthetic construct
  misc_feature 1..132: note = Description of Artificial Sequence: Synthetic polynucleotide
  source 1..132: mol_type = other RNA
ggctgtggtggggactgcgggttttagagctagaaatagcaagttaaaataaggctagtccgttatcaacttgaaaaagtggcaccgagtcggtgcggggtgttcactgctggcttccgcagtccccaccac

SEQ ID NO: 1621 - RNA, 132 nt, synthetic construct
  misc_feature 1..132: note = Description of Artificial Sequence: Synthetic polynucleotide
  source 1..132: mol_type = other RNA
ggctgtggtggggactgcgggttttagagctagaaatagcaagttaaaataaggctagtccgttatcaacttgaaaaagtggcaccgagtcggtgcgcccaaggggtgttcactgctggcttccgcagtccc

SEQ ID NO: 1622 - RNA, 132 nt, synthetic construct
  misc_feature 1..132: note = Description of Artificial Sequence: Synthetic polynucleotide
  source 1..132: mol_type = other RNA
ggctgtggtggggactgcgggttttagagctagaaatagcaagttaaaataaggctagtccgttatcaacttgaaaaagtggcaccgagtcggtgcaggggtgttcactgctggcttccgcagtccccacca

SEQ ID NO: 1623 - RNA, 132 nt, synthetic construct
  misc_feature 1..132: note = Description of Artificial Sequence: Synthetic polynucleotide
  source 1..132: mol_type = other RNA
ggctgtggtggggactgcgggttttagagctagaaatagcaagttaaaataaggctagtccgttatcaacttgaaaaagtggcaccgagtcggtgcaaggggtgttcactgctggcctccgcagtccccacc

SEQ ID NO: 1624 - RNA, 132 nt, synthetic construct
  misc_feature 1..132: note = Description of Artificial Sequence: Synthetic polynucleotide
  source 1..132: mol_type = other RNA
ggctgtggtggggactgcgggttttagagctagaaatagcaagttaaaataaggctagtccgttatcaacttgaaaaagtggcaccgagtcggtgcggggtgttcactgctggcctccgcagtccccaccac

SEQ ID NO: 1625 - RNA, 132 nt, synthetic construct
  misc_feature 1..132: note = Description of Artificial Sequence: Synthetic polynucleotide
  source 1..132: mol_type = other RNA
ggctgtggtggggactgcgggttttagagctagaaatagcaagttaaaataaggctagtccgttatcaacttgaaaaagtggcaccgagtcggtgcgggtgttcactgctggcttccgcagtcccctttttt

SEQ ID NO: 1626 - RNA, 132 nt, synthetic construct
  misc_feature 1..132: note = Description of Artificial Sequence: Synthetic polynucleotide
  source 1..132: mol_type = other RNA
ggctgtggtggggactgcgggttttagagctagaaatagcaagttaaaataaggctagtccgttatcaacttgaaaaagtggcaccgagtcggtgcgggtgttcactgctggcctccgcagtccccaccaca

SEQ ID NO: 1627 - RNA, 133 nt, synthetic construct
  misc_feature 1..133: note = Description of Artificial Sequence: Synthetic polynucleotide
  source 1..133: mol_type = other RNA
ggctgtggtggggactgcgggttttagagctagaaatagcaagttaaaataaggctagtccgttatcaacttgaaaaagtggcaccgagtcggtgcgggtgttcactgctggcttccgcagtccccttttttt

SEQ ID NO: 1628 - RNA, 133 nt, synthetic construct
  misc_feature 1..133: note = Description of Artificial Sequence: Synthetic polynucleotide
  source 1..133: mol_type = other RNA
ggctgtggtggggactgcgggttttagagctagaaatagcaagttaaaataaggctagtccgttatcaacttgaaaaagtggcaccgagtcggtgcggggtgttcactgctggcctccgcagtccccaccaca

SEQ ID NO: 1629 - RNA, 133 nt, synthetic construct
  misc_feature 1..133: note = Description of Artificial Sequence: Synthetic polynucleotide
  source 1..133: mol_type = other RNA
ggctgtggtggggactgcgggttttagagctagaaatagcaagttaaaataaggctagtccgttatcaacttgaaaaagtggcaccgagtcggtgcggtgttcactgctggcttccgcagtccccactttttt

SEQ ID NO: 1630 - RNA, 133 nt, synthetic construct
  misc_feature 1..133: note = Description of Artificial Sequence: Synthetic polynucleotide
  source 1..133: mol_type = other RNA
ggctgtggtggggactgcgggttttagagctagaaatagcaagttaaaataaggctagtccgttatcaacttgaaaaagtggcaccgagtcggtgcggtgttcactgctggcctccgcagtccccattttttt

SEQ ID NO: 1631 - RNA, 133 nt, synthetic construct
  misc_feature 1..133: note = Description of Artificial Sequence: Synthetic polynucleotide
  source 1..133: mol_type = other RNA
ggctgtggtggggactgcgggttttagagctagaaatagcaagttaaaataaggctagtccgttatcaacttgaaaaagtggcaccgagtcggtgcggtgttcactgctggcttccgcagtccccattttttt

SEQ ID NO: 1632 - RNA, 133 nt, synthetic construct
  misc_feature 1..133: note = Description of Artificial Sequence: Synthetic polynucleotide
  source 1..133: mol_type = other RNA
ggctgtggtggggactgcgggttttagagctagaaatagcaagttaaaataaggctagtccgttatcaacttgaaaaagtggcaccgagtcggtgcgcccaaggggtgttcactgctggcttccgcagtcccc

SEQ ID NO: 1633 - RNA, 133 nt, synthetic construct
  misc_feature 1..133: note = Description of Artificial Sequence: Synthetic polynucleotide
  source 1..133: mol_type = other RNA
ggctgtggtggggactgcgggttttagagctagaaatagcaagttaaaataaggctagtccgttatcaacttgaaaaagtggcaccgagtcggtgcgcccaaggggtgttcactgctggcctccgcagtcccc

SEQ ID NO: 1634 - RNA, 133 nt, synthetic construct
  misc_feature 1..133: note = Description of Artificial Sequence: Synthetic polynucleotide
  source 1..133: mol_type = other RNA
ggctgtggtggggactgcgggttttagagctagaaatagcaagttaaaataaggctagtccgttatcaacttgaaaaagtggcaccgagtcggtgcaggggtgttcactgctggcttccgcagtccccaccac

SEQ ID NO: 1635 - RNA, 133 nt, synthetic construct
  misc_feature 1..133: note = Description of Artificial Sequence: Synthetic polynucleotide
  source 1..133: mol_type = other RNA
ggctgtggtggggactgcgggttttagagctagaaatagcaagttaaaataaggctagtccgttatcaacttgaaaaagtggcaccgagtcggtgcaggggtgttcactgctggcctccgcagtccccaccac

SEQ ID NO: 1636 - RNA, 133 nt, synthetic construct
  misc_feature 1..133: note = Description of Artificial Sequence: Synthetic polynucleotide
  source 1..133: mol_type = other RNA
ggctgtggtggggactgcgggttttagagctagaaatagcaagttaaaataaggctagtccgttatcaacttgaaaaagtggcaccgagtcggtgcggggtgttcactgctggcttccgcagtcccttttttt

SEQ ID NO: 1637 - RNA, 133 nt, synthetic construct
  misc_feature 1..133: note = Description of Artificial Sequence: Synthetic polynucleotide
  source 1..133: mol_type = other RNA
ggctgtggtggggactgcgggttttagagctagaaatagcaagttaaaataaggctagtccgttatcaacttgaaaaagtggcaccgagtcggtgcaaggggtgttcactgctggcttccgcagtccccacca

SEQ ID NO: 1638 - RNA, 133 nt, synthetic construct
  misc_feature 1..133: note = Description of Artificial Sequence: Synthetic polynucleotide
  source 1..133: mol_type = other RNA
ggctgtggtggggactgcgggttttagagctagaaatagcaagttaaaataaggctagtccgttatcaacttgaaaaagtggcaccgagtcggtgcggggtgttcactgctggcctccgcagtcccttttttt

SEQ ID NO: 1639 - RNA, 133 nt, synthetic construct
  misc_feature 1..133: note = Description of Artificial Sequence: Synthetic polynucleotide
  source 1..133: mol_type = other RNA
ggctgtggtggggactgcgggttttagagctagaaatagcaagttaaaataaggctagtccgttatcaacttgaaaaagtggcaccgagtcggtgcgggtgttcactgctggcctccgcagtccccttttttt

SEQ ID NO: 1640 - RNA, 133 nt, synthetic construct
  misc_feature 1..133: note = Description of Artificial Sequence: Synthetic polynucleotide
  source 1..133: mol_type = other RNA
ggctgtggtggggactgcgggttttagagctagaaatagcaagttaaaataaggctagtccgttatcaacttgaaaaagtggcaccgagtcggtgcggtgttcactgctggcctccgcagtccccaccacagc

SEQ ID NO: 1641 - RNA, 133 nt, synthetic construct
  misc_feature 1..133: note = Description of Artificial Sequence: Synthetic polynucleotide
  source 1..133: mol_type = other RNA
ggctgtggtggggactgcgggttttagagctagaaatagcaagttaaaataaggctagtccgttatcaacttgaaaaagtggcaccgagtcggtgcggggtgttcactgctggcctccgcagtcccctttttt

SEQ ID NO: 1642 - RNA, 133 nt, synthetic construct
  misc_feature 1..133: note = Description of Artificial Sequence: Synthetic polynucleotide
  source 1..133: mol_type = other RNA
ggctgtggtggggactgcgggttttagagctagaaatagcaagttaaaataaggctagtccgttatcaacttgaaaaagtggcaccgagtcggtgcggggtgttcactgctggcttccgcagtcccctttttt

SEQ ID NO: 1643 - RNA, 133 nt, synthetic construct
  misc_feature 1..133: note = Description of Artificial Sequence: Synthetic polynucleotide
  source 1..133: mol_type = other RNA
ggctgtggtggggactgcgggttttagagctagaaatagcaagttaaaataaggctagtccgttatcaacttgaaaaagtggcaccgagtcggtgcaaggggtgttcactgctggcctccgcagtccccacca

SEQ ID NO: 1644 - RNA, 133 nt, synthetic construct
  misc_feature 1..133: note = Description of Artificial Sequence: Synthetic polynucleotide
  source 1..133: mol_type = other RNA
ggctgtggtggggactgcgggttttagagctagaaatagcaagttaaaataaggctagtccgttatcaacttgaaaaagtggcaccgagtcggtgcggtgttcactgctggcctccgcagtccccactttttt

SEQ ID NO: 1645 - RNA, 133 nt, synthetic construct
  misc_feature 1..133: note = Description of Artificial Sequence: Synthetic polynucleotide
  source 1..133: mol_type = other RNA
ggctgtggtggggactgcgggttttagagctagaaatagcaagttaaaataaggctagtccgttatcaacttgaaaaagtggcaccgagtcggtgcggggtgttcactgctggcttccgcagtccccaccaca

SEQ ID NO: 1646 - RNA, 133 nt, synthetic construct
  misc_feature 1..133: note = Description of Artificial Sequence: Synthetic polynucleotide
  source 1..133: mol_type = other RNA
ggctgtggtggggactgcgggttttagagctagaaatagcaagttaaaataaggctagtccgttatcaacttgaaaaagtggcaccgagtcggtgcggtgttcactgctggcttccgcagtccccaccacagc

SEQ ID NO: 1647 - RNA, 134 nt, synthetic construct
  misc_feature 1..134: note = Description of Artificial Sequence: Synthetic polynucleotide
  source 1..134: mol_type = other RNA
ggctgtggtggggactgcgggttttagagctagaaatagcaagttaaaataaggctagtccgttatcaacttgaaaaagtggcaccgagtcggtgcacgcccaaggggtgttcactgctggcctccgcagtccc

SEQ ID NO: 1648 - RNA, 134 nt, synthetic construct
  misc_feature 1..134: note = Description of Artificial Sequence: Synthetic polynucleotide
  source 1..134: mol_type = other RNA
ggctgtggtggggactgcgggttttagagctagaaatagcaagttaaaataaggctagtccgttatcaacttgaaaaagtggcaccgagtcggtgcaaggggtgttcactgctggcttccgcagtccccaccac

SEQ ID NO: 1649 - RNA, 134 nt, synthetic construct
  misc_feature 1..134: note = Description of Artificial Sequence: Synthetic polynucleotide
  source 1..134: mol_type = other RNA
ggctgtggtggggactgcgggttttagagctagaaatagcaagttaaaataaggctagtccgttatcaacttgaaaaagtggcaccgagtcggtgcgcccaaggggtgttcactgctggcctccgcagtcccca

SEQ ID NO: 1650 - RNA, 134 nt, synthetic construct
  misc_feature 1..134: note = Description of Artificial Sequence: Synthetic polynucleotide
  source 1..134: mol_type = other RNA
ggctgtggtggggactgcgggttttagagctagaaatagcaagttaaaataaggctagtccgttatcaacttgaaaaagtggcaccgagtcggtgcgcccaaggggtgttcactgctggcttccgcagtcccca

SEQ ID NO: 1651 - RNA, 134 nt, synthetic construct
  misc_feature 1..134: note = Description of Artificial Sequence: Synthetic polynucleotide
  source 1..134: mol_type = other RNA
ggctgtggtggggactgcgggttttagagctagaaatagcaagttaaaataaggctagtccgttatcaacttgaaaaagtggcaccgagtcggtgcacgcccaaggggtgttcactgctggcttccgcagtccc

SEQ ID NO: 1652 - RNA, 134 nt, synthetic construct
  misc_feature 1..134: note = Description of Artificial Sequence: Synthetic polynucleotide
  source 1..134: mol_type = other RNA
ggctgtggtggggactgcgggttttagagctagaaatagcaagttaaaataaggctagtccgttatcaacttgaaaaagtggcaccgagtcggtgcaggggtgttcactgctggcttccgcagtcccctttttt

SEQ ID NO: 1653 - RNA, 134 nt, synthetic construct
  misc_feature 1..134: note = Description of Artificial Sequence: Synthetic polynucleotide
  source 1..134: mol_type = other RNA
ggctgtggtggggactgcgggttttagagctagaaatagcaagttaaaataaggctagtccgttatcaacttgaaaaagtggcaccgagtcggtgcaaggggtgttcactgctggcctccgcagtccccaccac

SEQ ID NO: 1654 - RNA, 134 nt, synthetic construct
  misc_feature 1..134: note = Description of Artificial Sequence: Synthetic polynucleotide
  source 1..134: mol_type = other RNA
ggctgtggtggggactgcgggttttagagctagaaatagcaagttaaaataaggctagtccgttatcaacttgaaaaagtggcaccgagtcggtgcgggtgttcactgctggcctccgcagtccccaccacagc

SEQ ID NO: 1655 - RNA, 134 nt, synthetic construct
  misc_feature 1..134: note = Description of Artificial Sequence: Synthetic polynucleotide
  source 1..134: mol_type = other RNA
ggctgtggtggggactgcgggttttagagctagaaatagcaagttaaaataaggctagtccgttatcaacttgaaaaagtggcaccgagtcggtgcgggtgttcactgctggcttccgcagtccccattttttt

SEQ ID NO: 1656 - RNA, 134 nt, synthetic construct
  misc_feature 1..134: note = Description of Artificial Sequence: Synthetic polynucleotide
  source 1..134: mol_type = other RNA
ggctgtggtggggactgcgggttttagagctagaaatagcaagttaaaataaggctagtccgttatcaacttgaaaaagtggcaccgagtcggtgcaggggtgttcactgctggcttccgcagtcccttttttt

SEQ ID NO: 1657 - RNA, 134 nt, synthetic construct
  misc_feature 1..134: note = Description of Artificial Sequence: Synthetic polynucleotide
  source 1..134: mol_type = other RNA
ggctgtggtggggactgcgggttttagagctagaaatagcaagttaaaataaggctagtccgttatcaacttgaaaaagtggcaccgagtcggtgcgggtgttcactgctggcctccgcagtccccactttttt

SEQ ID NO: 1658 - RNA, 134 nt, synthetic construct
  misc_feature 1..134: note = Description of Artificial Sequence: Synthetic polynucleotide
  source 1..134: mol_type = other RNA
ggctgtggtggggactgcgggttttagagctagaaatagcaagttaaaataaggctagtccgttatcaacttgaaaaagtggcaccgagtcggtgcaggggtgttcactgctggcctccgcagtcccctttttt

SEQ ID NO: 1659 - RNA, 134 nt, synthetic construct
  misc_feature 1..134: note = Description of Artificial Sequence: Synthetic polynucleotide
  source 1..134: mol_type = other RNA
ggctgtggtggggactgcgggttttagagctagaaatagcaagttaaaataaggctagtccgttatcaacttgaaaaagtggcaccgagtcggtgcggggtgttcactgctggcctccgcagtccccttttttt

SEQ ID NO: 1660 - RNA, 134 nt, synthetic construct
  misc_feature 1..134: note = Description of Artificial Sequence: Synthetic polynucleotide
  source 1..134: mol_type = other RNA
ggctgtggtggggactgcgggttttagagctagaaatagcaagttaaaataaggctagtccgttatcaacttgaaaaagtggcaccgagtcggtgcggggtgttcactgctggcttccgcagtccccttttttt

SEQ ID NO: 1661 - RNA, 134 nt, synthetic construct
  misc_feature 1..134: note = Description of Artificial Sequence: Synthetic polynucleotide
  source 1..134: mol_type = other RNA
ggctgtggtggggactgcgggttttagagctagaaatagcaagttaaaataaggctagtccgttatcaacttgaaaaagtggcaccgagtcggtgcgggtgttcactgctggcctccgcagtccccattttttt

SEQ ID NO: 1662 - RNA, 134 nt, synthetic construct
  misc_feature 1..134: note = Description of Artificial Sequence: Synthetic polynucleotide
  source 1..134: mol_type = other RNA
ggctgtggtggggactgcgggttttagagctagaaatagcaagttaaaataaggctagtccgttatcaacttgaaaaagtggcaccgagtcggtgcgggtgttcactgctggcttccgcagtccccactttttt

SEQ ID NO: 1663 - RNA, 134 nt, synthetic construct
  misc_feature 1..134: note = Description of Artificial Sequence: Synthetic polynucleotide
  source 1..134: mol_type = other RNA
ggctgtggtggggactgcgggttttagagctagaaatagcaagttaaaataaggctagtccgttatcaacttgaaaaagtggcaccgagtcggtgcgggtgttcactgctggcttccgcagtccccaccacagc

SEQ ID NO: 1664 - RNA, 134 nt, synthetic construct
  misc_feature 1..134: note = Description of Artificial Sequence: Synthetic polynucleotide
  source 1..134: mol_type = other RNA
ggctgtggtggggactgcgggttttagagctagaaatagcaagttaaaataaggctagtccgttatcaacttgaaaaagtggcaccgagtcggtgcaggggtgttcactgctggcctccgcagtccccaccaca

SEQ ID NO: 1665 - RNA, 134 nt, synthetic construct
  misc_feature 1..134: note = Description of Artificial Sequence: Synthetic polynucleotide
  source 1..134: mol_type = other RNA
ggctgtggtggggactgcgggttttagagctagaaatagcaagttaaaataaggctagtccgttatcaacttgaaaaagtggcaccgagtcggtgcaggggtgttcactgctggcctccgcagtcccttttttt

SEQ ID NO: 1666 - RNA, 134 nt, synthetic construct
  misc_feature 1..134: note = Description of Artificial Sequence: Synthetic polynucleotide
  source 1..134: mol_type = other RNA
ggctgtggtggggactgcgggttttagagctagaaatagcaagttaaaataaggctagtccgttatcaacttgaaaaagtggcaccgagtcggtgcggtgttcactgctggcctccgcagtccccacttttttt

SEQ ID NO: 1667 - RNA, 134 nt, synthetic construct
  misc_feature 1..134: note = Description of Artificial Sequence: Synthetic polynucleotide
  source 1..134: mol_type = other RNA
ggctgtggtggggactgcgggttttagagctagaaatagcaagttaaaataaggctagtccgttatcaacttgaaaaagtggcaccgagtcggtgcggtgttcactgctggcttccgcagtccccacttttttt

SEQ ID NO: 1668 - RNA, 134 nt, synthetic construct
  misc_feature 1..134: note = Description of Artificial Sequence: Synthetic polynucleotide
  source 1..134: mol_type = other RNA
ggctgtggtggggactgcgggttttagagctagaaatagcaagttaaaataaggctagtccgttatcaacttgaaaaagtggcaccgagtcggtgcaggggtgttcactgctggcttccgcagtccccaccaca

SEQ ID NO: 1669 - RNA, 135 nt, synthetic construct
  misc_feature 1..135: note = Description of Artificial Sequence: Synthetic polynucleotide
  source 1..135: mol_type = other RNA
ggctgtggtggggactgcgggttttagagctagaaatagcaagttaaaataaggctagtccgttatcaacttgaaaaagtggcaccgagtcggtgcggtgttcactgctggcttccgcagtccccaccatttttt

SEQ ID NO: 1670 - RNA, 135 nt, synthetic construct
  misc_feature 1..135: note = Description of Artificial Sequence: Synthetic polynucleotide
  source 1..135: mol_type = other RNA
ggctgtggtggggactgcgggttttagagctagaaatagcaagttaaaataaggctagtccgttatcaacttgaaaaagtggcaccgagtcggtgcggggtgttcactgctggcctccgcagtccccactttttt

SEQ ID NO: 1671 - RNA, 135 nt, synthetic construct
  misc_feature 1..135: note = Description of Artificial Sequence: Synthetic polynucleotide
  source 1..135: mol_type = other RNA
ggctgtggtggggactgcgggttttagagctagaaatagcaagttaaaataaggctagtccgttatcaacttgaaaaagtggcaccgagtcggtgcaaggggtgttcactgctggcctccgcagtccccaccaca

SEQ ID NO: 1672 - RNA, 135 nt, synthetic construct
  misc_feature 1..135: note = Description of Artificial Sequence: Synthetic polynucleotide
  source 1..135: mol_type = other RNA
ggctgtggtggggactgcgggttttagagctagaaatagcaagttaaaataaggctagtccgttatcaacttgaaaaagtggcaccgagtcggtgcggtgttcactgctggcctccgcagtccccaccatttttt

SEQ ID NO: 1673 - RNA, 135 nt, synthetic construct
  misc_feature 1..135: note = Description of Artificial Sequence: Synthetic polynucleotide
  source 1..135: mol_type = other RNA
ggctgtggtggggactgcgggttttagagctagaaatagcaagttaaaataaggctagtccgttatcaacttgaaaaagtggcaccgagtcggtgcaggggtgttcactgctggcctccgcagtccccttttttt

SEQ ID NO: 1674 - RNA, 135 nt, synthetic construct
  misc_feature 1..135: note = Description of Artificial Sequence: Synthetic polynucleotide
  source 1..135: mol_type = other RNA
ggctgtggtggggactgcgggttttagagctagaaatagcaagttaaaataaggctagtccgttatcaacttgaaaaagtggcaccgagtcggtgcaaggggtgttcactgctggcctccgcagtcccctttttt

SEQ ID NO: 1675 - RNA, 135 nt, synthetic construct
  misc_feature 1..135: note = Description of Artificial Sequence: Synthetic polynucleotide
  source 1..135: mol_type = other RNA
ggctgtggtggggactgcgggttttagagctagaaatagcaagttaaaataaggctagtccgttatcaacttgaaaaagtggcaccgagtcggtgcgggtgttcactgctggcttccgcagtccccacttttttt

SEQ ID NO: 1676 - RNA, 135 nt, synthetic construct
  misc_feature 1..135: note = Description of Artificial Sequence: Synthetic polynucleotide
  source 1..135: mol_type = other RNA
ggctgtggtggggactgcgggttttagagctagaaatagcaagttaaaataaggctagtccgttatcaacttgaaaaagtggcaccgagtcggtgcggggtgttcactgctggcttccgcagtccccactttttt

SEQ ID NO: 1677 - RNA, 135 nt, synthetic construct
  misc_feature 1..135: note = Description of Artificial Sequence: Synthetic polynucleotide
  source 1..135: mol_type = other RNA
ggctgtggtggggactgcgggttttagagctagaaatagcaagttaaaataaggctagtccgttatcaacttgaaaaagtggcaccgagtcggtgcggtgttcactgctggcctccgcagtccccaccttttttt

SEQ ID NO: 1678 - RNA, 135 nt, synthetic construct
  misc_feature 1..135: note = Description of Artificial Sequence: Synthetic polynucleotide
  source 1..135: mol_type = other RNA
ggctgtggtggggactgcgggttttagagctagaaatagcaagttaaaataaggctagtccgttatcaacttgaaaaagtggcaccgagtcggtgcggggtgttcactgctggcttccgcagtccccaccacagc

SEQ ID NO: 1679 - RNA, 135 nt, synthetic construct
  misc_feature 1..135: note = Description of Artificial Sequence: Synthetic polynucleotide
  source 1..135: mol_type = other RNA
ggctgtggtggggactgcgggttttagagctagaaatagcaagttaaaataaggctagtccgttatcaacttgaaaaagtggcaccgagtcggtgcaaggggtgttcactgctggcttccgcagtccccaccaca

SEQ ID NO: 1680 - RNA, 135 nt, synthetic construct
  misc_feature 1..135: note = Description of Artificial Sequence: Synthetic polynucleotide
  source 1..135: mol_type = other RNA
ggctgtggtggggactgcgggttttagagctagaaatagcaagttaaaataaggctagtccgttatcaacttgaaaaagtggcaccgagtcggtgcggggtgttcactgctggcttccgcagtccccattttttt

SEQ ID NO: 1681 - RNA, 135 nt, synthetic construct
  misc_feature 1..135: note = Description of Artificial Sequence: Synthetic polynucleotide
  source 1..135: mol_type = other RNA
ggctgtggtggggactgcgggttttagagctagaaatagcaagttaaaataaggctagtccgttatcaacttgaaaaagtggcaccgagtcggtgcggtgttcactgctggcttccgcagtccccaccttttttt

SEQ ID NO: 1682 - RNA, 135 nt, synthetic construct
  misc_feature 1..135: note = Description of Artificial Sequence: Synthetic polynucleotide
  source 1..135: mol_type = other RNA
ggctgtggtggggactgcgggttttagagctagaaatagcaagttaaaataaggctagtccgttatcaacttgaaaaagtggcaccgagtcggtgcaaggggtgttcactgctggcttccgcagtcccttttttt

SEQ ID NO: 1683 - RNA, 135 nt, synthetic construct
  misc_feature 1..135: note = Description of Artificial Sequence: Synthetic polynucleotide
  source 1..135: mol_type = other RNA
ggctgtggtggggactgcgggttttagagctagaaatagcaagttaaaataaggctagtccgttatcaacttgaaaaagtggcaccgagtcggtgcaaggggtgttcactgctggcttccgcagtcccctttttt

SEQ ID NO: 1684 - RNA, 135 nt, synthetic construct
  misc_feature 1..135: note = Description of Artificial Sequence: Synthetic polynucleotide
  source 1..135: mol_type = other RNA
ggctgtggtggggactgcgggttttagagctagaaatagcaagttaaaataaggctagtccgttatcaacttgaaaaagtggcaccgagtcggtgcgcccaaggggtgttcactgctggcctccgcagtccccac

SEQ ID NO: 1685 - RNA, 135 nt, synthetic construct
  misc_feature 1..135: note = Description of Artificial Sequence: Synthetic polynucleotide
  source 1..135: mol_type = other RNA
ggctgtggtggggactgcgggttttagagctagaaatagcaagttaaaataaggctagtccgttatcaacttgaaaaagtggcaccgagtcggtgcgggtgttcactgctggcctccgcagtccccacttttttt

SEQ ID NO: 1686 - RNA, 135 nt, synthetic construct
  misc_feature 1..135: note = Description of Artificial Sequence: Synthetic polynucleotide
  source 1..135: mol_type = other RNA
ggctgtggtggggactgcgggttttagagctagaaatagcaagttaaaataaggctagtccgttatcaacttgaaaaagtggcaccgagtcggtgcacgcccaaggggtgttcactgctggcctccgcagtcccc

SEQ ID NO: 1687 - RNA, 135 nt, synthetic construct
  misc_feature 1..135: note = Description of Artificial Sequence: Synthetic polynucleotide
  source 1..135: mol_type = other RNA
ggctgtggtggggactgcgggttttagagctagaaatagcaagttaaaataaggctagtccgttatcaacttgaaaaagtggcaccgagtcggtgcgcccaaggggtgttcactgctggcttccgcagtccccac

SEQ ID NO: 1688 - RNA, 135 nt, synthetic construct
  misc_feature 1..135: note = Description of Artificial Sequence: Synthetic polynucleotide
  source 1..135: mol_type = other RNA
ggctgtggtggggactgcgggttttagagctagaaatagcaagttaaaataaggctagtccgttatcaacttgaaaaagtggcaccgagtcggtgcacgcccaaggggtgttcactgctggcttccgcagtcccc

SEQ ID NO: 1689 - RNA, 135 nt, synthetic construct
  misc_feature 1..135: note = Description of Artificial Sequence: Synthetic polynucleotide
  source 1..135: mol_type = other RNA
ggctgtggtggggactgcgggttttagagctagaaatagcaagttaaaataaggctagtccgttatcaacttgaaaaagtggcaccgagtcggtgcaggggtgttcactgctggcttccgcagtccccttttttt

SEQ ID NO: 1690 - RNA, 135 nt, synthetic construct
  misc_feature 1..135: note = Description of Artificial Sequence: Synthetic polynucleotide
  source 1..135: mol_type = other RNA
ggctgtggtggggactgcgggttttagagctagaaatagcaagttaaaataaggctagtccgttatcaacttgaaaaagtggcaccgagtcggtgcggggtgttcactgctggcctccgcagtccccattttttt

SEQ ID NO: 1691 - RNA, 135 nt, synthetic construct
  misc_feature 1..135: note = Description of Artificial Sequence: Synthetic polynucleotide
  source 1..135: mol_type = other RNA
ggctgtggtggggactgcgggttttagagctagaaatagcaagttaaaataaggctagtccgttatcaacttgaaaaagtggcaccgagtcggtgcggggtgttcactgctggcctccgcagtccccaccacagc

SEQ ID NO: 1692 - RNA, 135 nt, synthetic construct
  misc_feature 1..135: note = Description of Artificial Sequence: Synthetic polynucleotide
  source 1..135: mol_type = other RNA
ggctgtggtggggactgcgggttttagagctagaaatagcaagttaaaataaggctagtccgttatcaacttgaaaaagtggcaccgagtcggtgcaaggggtgttcactgctggcctccgcagtcccttttttt

SEQ ID NO: 1693 - RNA, 136 nt, synthetic construct
  misc_feature 1..136: note = Description of Artificial Sequence: Synthetic polynucleotide
  source 1..136: mol_type = other RNA
ggctgtggtggggactgcgggttttagagctagaaatagcaagttaaaataaggctagtccgttatcaacttgaaaaagtggcaccgagtcggtgcggggtgttcactgctggcttccgcagtccccacttttttt

SEQ ID NO: 1694 - RNA, 136 nt, synthetic construct
  misc_feature 1..136: note = Description of Artificial Sequence: Synthetic polynucleotide
  source 1..136: mol_type = other RNA
ggctgtggtggggactgcgggttttagagctagaaatagcaagttaaaataaggctagtccgttatcaacttgaaaaagtggcaccgagtcggtgcaggggtgttcactgctggcttccgcagtccccaccacagc

SEQ ID NO: 1695 - RNA, 136 nt, synthetic construct
  misc_feature 1..136: note = Description of Artificial Sequence: Synthetic polynucleotide
  source 1..136: mol_type = other RNA
ggctgtggtggggactgcgggttttagagctagaaatagcaagttaaaataaggctagtccgttatcaacttgaaaaagtggcaccgagtcggtgcgggtgttcactgctggcttccgcagtccccaccatttttt

SEQ ID NO: 1696 - RNA, 136 nt, synthetic construct
  misc_feature 1..136: note = Description of Artificial Sequence: Synthetic polynucleotide
  source 1..136: mol_type = other RNA
ggctgtggtggggactgcgggttttagagctagaaatagcaagttaaaataaggctagtccgttatcaacttgaaaaagtggcaccgagtcggtgcgcccaaggggtgttcactgctggcctccgcagtccccacc

SEQ ID NO: 1697 - RNA, 136 nt, synthetic construct
  misc_feature 1..136: note = Description of Artificial Sequence: Synthetic polynucleotide
  source 1..136: mol_type = other RNA
ggctgtggtggggactgcgggttttagagctagaaatagcaagttaaaataaggctagtccgttatcaacttgaaaaagtggcaccgagtcggtgcgcccaaggggtgttcactgctggcttccgcagtccccacc

SEQ ID NO: 1698 - RNA, 136 nt, synthetic construct
  misc_feature 1..136: note = Description of Artificial Sequence: Synthetic polynucleotide
  source 1..136: mol_type = other RNA
ggctgtggtggggactgcgggttttagagctagaaatagcaagttaaaataaggctagtccgttatcaacttgaaaaagtggcaccgagtcggtgcaggggtgttcactgctggcctccgcagtccccactttttt

SEQ ID NO: 1699 - RNA, 136 nt, synthetic construct
  misc_feature 1..136: note = Description of Artificial Sequence: Synthetic polynucleotide
  source 1..136: mol_type = other RNA
ggctgtggtggggactgcgggttttagagctagaaatagcaagttaaaataaggctagtccgttatcaacttgaaaaagtggcaccgagtcggtgcacgcccaaggggtgttcactgctggcttccgcagtcccca

SEQ ID NO: 1700 - RNA, 136 nt, synthetic construct
  misc_feature 1..136: note = Description of Artificial Sequence: Synthetic polynucleotide
  source 1..136: mol_type = other RNA
ggctgtggtggggactgcgggttttagagctagaaatagcaagttaaaataaggctagtccgttatcaacttgaaaaagtggcaccgagtcggtgcggggtgttcactgctggcctccgcagtccccacttttttt

SEQ ID NO: 1701 - RNA, 136 nt, synthetic construct
  misc_feature 1..136: note = Description of Artificial Sequence: Synthetic polynucleotide
  source 1..136: mol_type = other RNA
ggctgtggtggggactgcgggttttagagctagaaatagcaagttaaaataaggctagtccgttatcaacttgaaaaagtggcaccgagtcggtgcaggggtgttcactgctggcctccgcagtccccattttttt

SEQ ID NO: 1702 - RNA, 136 nt, synthetic construct
  misc_feature 1..136: note = Description of Artificial Sequence: Synthetic polynucleotide
  source 1..136: mol_type = other RNA
ggctgtggtggggactgcgggttttagagctagaaatagcaagttaaaataaggctagtccgttatcaacttgaaaaagtggcaccgagtcggtgcacgcccaaggggtgttcactgctggcctccgcagtcccca

SEQ ID NO: 1703 - RNA, 136 nt, synthetic construct
  misc_feature 1..136: note = Description of Artificial Sequence: Synthetic polynucleotide
  source 1..136: mol_type = other RNA
ggctgtggtggggactgcgggttttagagctagaaatagcaagttaaaataaggctagtccgttatcaacttgaaaaagtggcaccgagtcggtgcgggtgttcactgctggcctccgcagtccccaccatttttt

SEQ ID NO: 1704 - RNA, 136 nt, synthetic construct
  misc_feature 1..136: note = Description of Artificial Sequence: Synthetic polynucleotide
  source 1..136: mol_type = other RNA
ggctgtggtggggactgcgggttttagagctagaaatagcaagttaaaataaggctagtccgttatcaacttgaaaaagtggcaccgagtcggtgcggtgttcactgctggcctccgcagtccccaccattttttt

SEQ ID NO: 1705 - RNA, 136 nt, synthetic construct
  misc_feature 1..136: note = Description of Artificial Sequence: Synthetic polynucleotide
  source 1..136: mol_type = other RNA
ggctgtggtggggactgcgggttttagagctagaaatagcaagttaaaataaggctagtccgttatcaacttgaaaaagtggcaccgagtcggtgcgggtgttcactgctggcctccgcagtccccaccttttttt

SEQ ID NO: 1706 - RNA, 136 nt, synthetic construct
  misc_feature 1..136: note = Description of Artificial Sequence: Synthetic polynucleotide
  source 1..136: mol_type = other RNA
ggctgtggtggggactgcgggttttagagctagaaatagcaagttaaaataaggctagtccgttatcaacttgaaaaagtggcaccgagtcggtgcgggtgttcactgctggcttccgcagtccccaccttttttt

SEQ ID NO: 1707 - RNA, 136 nt, synthetic construct
  misc_feature 1..136: note = Description of Artificial Sequence: Synthetic polynucleotide
  source 1..136: mol_type = other RNA
ggctgtggtggggactgcgggttttagagctagaaatagcaagttaaaataaggctagtccgttatcaacttgaaaaagtggcaccgagtcggtgcaggggtgttcactgctggcttccgcagtccccactttttt

SEQ ID NO: 1708 - RNA, 136 nt, synthetic construct
  misc_feature 1..136: note = Description of Artificial Sequence: Synthetic polynucleotide
  source 1..136: mol_type = other RNA
ggctgtggtggggactgcgggttttagagctagaaatagcaagttaaaataaggctagtccgttatcaacttgaaaaagtggcaccgagtcggtgcaggggtgttcactgctggcctccgcagtccccaccacagc

SEQ ID NO: 1709 - RNA, 136 nt, synthetic construct
  misc_feature 1..136: note = Description of Artificial Sequence: Synthetic polynucleotide
  source 1..136: mol_type = other RNA
ggctgtggtggggactgcgggttttagagctagaaatagcaagttaaaataaggctagtccgttatcaacttgaaaaagtggcaccgagtcggtgcaaggggtgttcactgctggcttccgcagtccccttttttt

SEQ ID NO: 1710 - RNA, 136 nt, synthetic construct
  misc_feature 1..136: note = Description of Artificial Sequence: Synthetic polynucleotide
  source 1..136: mol_type = other RNA
ggctgtggtggggactgcgggttttagagctagaaatagcaagttaaaataaggctagtccgttatcaacttgaaaaagtggcaccgagtcggtgcaggggtgttcactgctggcttccgcagtccccattttttt

SEQ ID NO: 1711 - RNA, 136 nt, synthetic construct
  misc_feature 1..136: note = Description of Artificial Sequence: Synthetic polynucleotide
  source 1..136: mol_type = other RNA
ggctgtggtggggactgcgggttttagagctagaaatagcaagttaaaataaggctagtccgttatcaacttgaaaaagtggcaccgagtcggtgcaaggggtgttcactgctggcctccgcagtccccttttttt

SEQ ID NO: 1712 - RNA, 136 nt, synthetic construct
  misc_feature 1..136: note = Description of Artificial Sequence: Synthetic polynucleotide
  source 1..136: mol_type = other RNA
ggctgtggtggggactgcgggttttagagctagaaatagcaagttaaaataaggctagtccgttatcaacttgaaaaagtggcaccgagtcggtgcggtgttcactgctggcttccgcagtccccaccattttttt

SEQ ID NO: 1713 - RNA, 137 nt, synthetic construct
  misc_feature 1..137: note = Description of Artificial Sequence: Synthetic polynucleotide
  source 1..137: mol_type = other RNA
ggctgtggtggggactgcgggttttagagctagaaatagcaagttaaaataaggctagtccgttatcaacttgaaaaagtggcaccgagtcggtgcggggtgttcactgctggcttccgcagtccccaccttttttt

SEQ ID NO: 1714 - RNA, 137 nt, synthetic construct
  misc_feature 1..137: note = Description of Artificial Sequence: Synthetic polynucleotide
  source 1..137: mol_type = other RNA
ggctgtggtggggactgcgggttttagagctagaaatagcaagttaaaataaggctagtccgttatcaacttgaaaaagtggcaccgagtcggtgcggtgttcactgctggcttccgcagtccccaccacttttttt

SEQ ID NO: 1715 - RNA, 137 nt, synthetic construct
  misc_feature 1..137: note = Description of Artificial Sequence: Synthetic polynucleotide
  source 1..137: mol_type = other RNA
ggctgtggtggggactgcgggttttagagctagaaatagcaagttaaaataaggctagtccgttatcaacttgaaaaagtggcaccgagtcggtgcggggtgttcactgctggcttccgcagtccccaccatttttt

SEQ ID NO: 1716 - RNA, 137 nt, synthetic construct
  misc_feature 1..137: note = Description of Artificial Sequence: Synthetic polynucleotide
  source 1..137: mol_type = other RNA
ggctgtggtggggactgcgggttttagagctagaaatagcaagttaaaataaggctagtccgttatcaacttgaaaaagtggcaccgagtcggtgcgggtgttcactgctggcctccgcagtccccaccattttttt

SEQ ID NO: 1717 - RNA, 137 nt, synthetic construct
  misc_feature 1..137: note = Description of Artificial Sequence: Synthetic polynucleotide
  source 1..137: mol_type = other RNA
ggctgtggtggggactgcgggttttagagctagaaatagcaagttaaaataaggctagtccgttatcaacttgaaaaagtggcaccgagtcggtgcgggtgttcactgctggcttccgcagtccccaccattttttt

SEQ ID NO: 1718 - RNA, 137 nt, synthetic construct
  misc_feature 1..137: note = Description of Artificial Sequence: Synthetic polynucleotide
  source 1..137: mol_type = other RNA
ggctgtggtggggactgcgggttttagagctagaaatagcaagttaaaataaggctagtccgttatcaacttgaaaaagtggcaccgagtcggtgcaaggggtgttcactgctggcctccgcagtccccactttttt

SEQ ID NO: 1719 - RNA, 137 nt, synthetic construct
  misc_feature 1..137: note = Description of Artificial Sequence: Synthetic polynucleotide
  source 1..137: mol_type = other RNA
ggctgtggtggggactgcgggttttagagctagaaatagcaagttaaaataaggctagtccgttatcaacttgaaaaagtggcaccgagtcggtgcaggggtgttcactgctggcttccgcagtccccacttttttt

SEQ ID NO: 1720 - RNA, 137 nt, synthetic construct
  misc_feature 1..137: note = Description of Artificial Sequence: Synthetic polynucleotide
  source 1..137: mol_type = other RNA
ggctgtggtggggactgcgggttttagagctagaaatagcaagttaaaataaggctagtccgttatcaacttgaaaaagtggcaccgagtcggtgcggtgttcactgctggcctccgcagtccccaccacttttttt

SEQ ID NO: 1721 - RNA, 137 nt, synthetic construct
  misc_feature 1..137: note = Description of Artificial Sequence: Synthetic polynucleotide
  source 1..137: mol_type = other RNA
ggctgtggtggggactgcgggttttagagctagaaatagcaagttaaaataaggctagtccgttatcaacttgaaaaagtggcaccgagtcggtgcaaggggtgttcactgctggcttccgcagtccccaccacagc

SEQ ID NO: 1722 - RNA, 137 nt, synthetic construct
  misc_feature 1..137: note = Description of Artificial Sequence: Synthetic polynucleotide
  source 1..137: mol_type = other RNA
ggctgtggtggggactgcgggttttagagctagaaatagcaagttaaaataaggctagtccgttatcaacttgaaaaagtggcaccgagtcggtgcggtgttcactgctggcctccgcagtccccaccacatttttt

SEQ ID NO: 1723 - RNA, 137 nt, synthetic construct
  misc_feature 1..137: note = Description of Artificial Sequence: Synthetic polynucleotide
  source 1..137: mol_type = other RNA
ggctgtggtggggactgcgggttttagagctagaaatagcaagttaaaataaggctagtccgttatcaacttgaaaaagtggcaccgagtcggtgcaggggtgttcactgctggcctccgcagtccccacttttttt

SEQ ID NO: 1724 - RNA, 137 nt, synthetic construct
  misc_feature 1..137: note = Description of Artificial Sequence: Synthetic polynucleotide
  source 1..137: mol_type = other RNA
ggctgtggtggggactgcgggttttagagctagaaatagcaagttaaaataaggctagtccgttatcaacttgaaaaagtggcaccgagtcggtgcggtgttcactgctggcttccgcagtccccaccacatttttt

SEQ ID NO: 1725 - RNA, 137 nt, synthetic construct
  misc_feature 1..137: note = Description of Artificial Sequence: Synthetic polynucleotide
  source 1..137: mol_type = other RNA
ggctgtggtggggactgcgggttttagagctagaaatagcaagttaaaataaggctagtccgttatcaacttgaaaaagtggcaccgagtcggtgcaaggggtgttcactgctggcctccgcagtccccaccacagc

SEQ ID NO: 1726 - RNA, 137 nt, synthetic construct
  misc_feature 1..137: note = Description of Artificial Sequence: Synthetic polynucleotide
  source 1..137: mol_type = other RNA
ggctgtggtggggactgcgggttttagagctagaaatagcaagttaaaataaggctagtccgttatcaacttgaaaaagtggcaccgagtcggtgcaaggggtgttcactgctggcctccgcagtccccattttttt

SEQ ID NO: 1727 - RNA, 137 nt, synthetic construct
  misc_feature 1..137: note = Description of Artificial Sequence: Synthetic polynucleotide
  source 1..137: mol_type = other RNA
ggctgtggtggggactgcgggttttagagctagaaatagcaagttaaaataaggctagtccgttatcaacttgaaaaagtggcaccgagtcggtgcggggtgttcactgctggcctccgcagtccccaccatttttt

SEQ ID NO: 1728 - RNA, 137 nt, synthetic construct
  misc_feature 1..137: note = Description of Artificial Sequence: Synthetic polynucleotide
  source 1..137: mol_type = other RNA
ggctgtggtggggactgcgggttttagagctagaaatagcaagttaaaataaggctagtccgttatcaacttgaaaaagtggcaccgagtcggtgcacgcccaaggggtgttcactgctggcttccgcagtccccac

SEQ ID NO: 1729 - RNA, 137 nt, synthetic construct
  misc_feature 1..137: note = Description of Artificial Sequence: Synthetic polynucleotide
  source 1..137: mol_type = other RNA
ggctgtggtggggactgcgggttttagagctagaaatagcaagttaaaataaggctagtccgttatcaacttgaaaaagtggcaccgagtcggtgcacgcccaaggggtgttcactgctggcctccgcagtccccac

SEQ ID NO: 1730 - RNA, 137 nt, synthetic construct
  misc_feature 1..137: note = Description of Artificial Sequence: Synthetic polynucleotide
  source 1..137: mol_type = other RNA
ggctgtggtggggactgcgggttttagagctagaaatagcaagttaaaataaggctagtccgttatcaacttgaaaaagtggcaccgagtcggtgcgcccaaggggtgttcactgctggcctccgcagtccccacca

SEQ ID NO: 1731 - RNA, 137 nt, synthetic construct
  misc_feature 1..137: note = Description of Artificial Sequence: Synthetic polynucleotide
  source 1..137: mol_type = other RNA
ggctgtggtggggactgcgggttttagagctagaaatagcaagttaaaataaggctagtccgttatcaacttgaaaaagtggcaccgagtcggtgcgccacgcccaaggggtgttcactgctggcttccgcagtccc

SEQ ID NO: 1732 - RNA, 137 nt, synthetic construct
  misc_feature 1..137: note = Description of Artificial Sequence: Synthetic polynucleotide
  source 1..137: mol_type = other RNA
ggctgtggtggggactgcgggttttagagctagaaatagcaagttaaaataaggctagtccgttatcaacttgaaaaagtggcaccgagtcggtgcgccacgcccaaggggtgttcactgctggcctccgcagtccc

SEQ ID NO: 1733 - RNA, 137 nt, synthetic construct
  misc_feature 1..137: note = Description of Artificial Sequence: Synthetic polynucleotide
  source 1..137: mol_type = other RNA
ggctgtggtggggactgcgggttttagagctagaaatagcaagttaaaataaggctagtccgttatcaacttgaaaaagtggcaccgagtcggtgcgcccaaggggtgttcactgctggcttccgcagtccccacca

SEQ ID NO: 1734 - RNA, 137 nt, synthetic construct
  misc_feature 1..137: note = Description of Artificial Sequence: Synthetic polynucleotide
  source 1..137: mol_type = other RNA
ggctgtggtggggactgcgggttttagagctagaaatagcaagttaaaataaggctagtccgttatcaacttgaaaaagtggcaccgagtcggtgcaaggggtgttcactgctggcttccgcagtccccactttttt

SEQ ID NO: 1735 - RNA, 137 nt, synthetic construct
  misc_feature 1..137: note = Description of Artificial Sequence: Synthetic polynucleotide
  source 1..137: mol_type = other RNA
ggctgtggtggggactgcgggttttagagctagaaatagcaagttaaaataaggctagtccgttatcaacttgaaaaagtggcaccgagtcggtgcggggtgttcactgctggcctccgcagtccccaccttttttt

SEQ ID NO: 1736 - RNA, 137 nt, synthetic construct
  misc_feature 1..137: note = Description of Artificial Sequence: Synthetic polynucleotide
  source 1..137: mol_type = other RNA
ggctgtggtggggactgcgggttttagagctagaaatagcaagttaaaataaggctagtccgttatcaacttgaaaaagtggcaccgagtcggtgcaaggggtgttcactgctggcttccgcagtccccattttttt

SEQ ID NO: 1737 - RNA, 138 nt, synthetic construct
  misc_feature 1..138: note = Description of Artificial Sequence: Synthetic polynucleotide
  source 1..138: mol_type = other RNA
ggctgtggtggggactgcgggttttagagctagaaatagcaagttaaaataaggctagtccgttatcaacttgaaaaagtggcaccgagtcggtgcgcccaaggggtgttcactgctggcttccgcagtccccaccac

SEQ ID NO: 1738 - RNA, 138 nt, synthetic construct
  misc_feature 1..138: note = Description of Artificial Sequence: Synthetic polynucleotide
  source 1..138: mol_type = other RNA
ggctgtggtggggactgcgggttttagagctagaaatagcaagttaaaataaggctagtccgttatcaacttgaaaaagtggcaccgagtcggtgcacgcccaaggggtgttcactgctggcttccgcagtccccacc

SEQ ID NO: 1739 - RNA, 138 nt, synthetic construct
  misc_feature 1..138: note = Description of Artificial Sequence: Synthetic polynucleotide
  source 1..138: mol_type = other RNA
ggctgtggtggggactgcgggttttagagctagaaatagcaagttaaaataaggctagtccgttatcaacttgaaaaagtggcaccgagtcggtgcggggtgttcactgctggcttccgcagtccccaccattttttt

SEQ ID NO: 1740 - RNA, 138 nt, synthetic construct
  misc_feature 1..138: note = Description of Artificial Sequence: Synthetic polynucleotide
  source 1..138: mol_type = other RNA
ggctgtggtggggactgcgggttttagagctagaaatagcaagttaaaataaggctagtccgttatcaacttgaaaaagtggcaccgagtcggtgcggtgttcactgctggcttccgcagtccccaccacattttttt

SEQ ID NO: 1741 - RNA, 138 nt, synthetic construct
  misc_feature 1..138: note = Description of Artificial Sequence: Synthetic polynucleotide
  source 1..138: mol_type = other RNA
ggctgtggtggggactgcgggttttagagctagaaatagcaagttaaaataaggctagtccgttatcaacttgaaaaagtggcaccgagtcggtgcgcccaaggggtgttcactgctggcctccgcagtccccaccac

SEQ ID NO: 1742 - RNA, 138 nt, synthetic construct
  misc_feature 1..138: note = Description of Artificial Sequence: Synthetic polynucleotide
  source 1..138: mol_type = other RNA
ggctgtggtggggactgcgggttttagagctagaaatagcaagttaaaataaggctagtccgttatcaacttgaaaaagtggcaccgagtcggtgcacgcccaaggggtgttcactgctggcctccgcagtccccacc

SEQ ID NO: 1743 - RNA, 138 nt, synthetic construct
  misc_feature 1..138: note = Description of Artificial Sequence: Synthetic polynucleotide
  source 1..138: mol_type = other RNA
ggctgtggtggggactgcgggttttagagctagaaatagcaagttaaaataaggctagtccgttatcaacttgaaaaagtggcaccgagtcggtgcgccacgcccaaggggtgttcactgctggcctccgcagtcccc

SEQ ID NO: 1744 - RNA, 138 nt, synthetic construct
  misc_feature 1..138: note = Description of Artificial Sequence: Synthetic polynucleotide
  source 1..138: mol_type = other RNA
ggctgtggtggggactgcgggttttagagctagaaatagcaagttaaaataaggctagtccgttatcaacttgaaaaagtggcaccgagtcggtgctgccacgcccaaggggtgttcactgctggcttccgcagtccc

SEQ ID NO: 1745 - RNA, 138 nt, synthetic construct
  misc_feature 1..138: note = Description of Artificial Sequence: Synthetic polynucleotide
  source 1..138: mol_type = other RNA
ggctgtggtggggactgcgggttttagagctagaaatagcaagttaaaataaggctagtccgttatcaacttgaaaaagtggcaccgagtcggtgctgccacgcccaaggggtgttcactgctggcctccgcagtccc

SEQ ID NO: 1746 - RNA, 138 nt, synthetic construct
  misc_feature 1..138: note = Description of Artificial Sequence: Synthetic polynucleotide
  source 1..138: mol_type = other RNA
ggctgtggtggggactgcgggttttagagctagaaatagcaagttaaaataaggctagtccgttatcaacttgaaaaagtggcaccgagtcggtgcgggtgttcactgctggcctccgcagtccccaccacatttttt

SEQ ID NO: 1747 - RNA, 138 nt, synthetic construct
  misc_feature 1..138: note = Description of Artificial Sequence: Synthetic polynucleotide
  source 1..138: mol_type = other RNA
ggctgtggtggggactgcgggttttagagctagaaatagcaagttaaaataaggctagtccgttatcaacttgaaaaagtggcaccgagtcggtgcgggtgttcactgctggcctccgcagtccccaccacttttttt

SEQ ID NO: 1748 - RNA, 138 nt, synthetic construct
  misc_feature 1..138: note = Description of Artificial Sequence: Synthetic polynucleotide
  source 1..138: mol_type = other RNA
ggctgtggtggggactgcgggttttagagctagaaatagcaagttaaaataaggctagtccgttatcaacttgaaaaagtggcaccgagtcggtgcaaggggtgttcactgctggcctccgcagtccccacttttttt

SEQ ID NO: 1749 - RNA, 138 nt, synthetic construct
  misc_feature 1..138: note = Description of Artificial Sequence: Synthetic polynucleotide
  source 1..138: mol_type = other RNA
ggctgtggtggggactgcgggttttagagctagaaatagcaagttaaaataaggctagtccgttatcaacttgaaaaagtggcaccgagtcggtgcaggggtgttcactgctggcctccgcagtccccaccatttttt

SEQ ID NO: 1750 - RNA, 138 nt, synthetic construct
  misc_feature 1..138: note = Description of Artificial Sequence: Synthetic polynucleotide
  source 1..138: mol_type = other RNA
ggctgtggtggggactgcgggttttagagctagaaatagcaagttaaaataaggctagtccgttatcaacttgaaaaagtggcaccgagtcggtgcaggggtgttcactgctggcctccgcagtccccaccttttttt

SEQ ID NO: 1751 - RNA, 138 nt, synthetic construct
  misc_feature 1..138: note = Description of Artificial Sequence: Synthetic polynucleotide
  source 1..138: mol_type = other RNA
ggctgtggtggggactgcgggttttagagctagaaatagcaagttaaaataaggctagtccgttatcaacttgaaaaagtggcaccgagtcggtgcaggggtgttcactgctggcttccgcagtccccaccatttttt

SEQ ID NO: 1752 - RNA, 138 nt, synthetic construct
  misc_feature 1..138: note = Description of Artificial Sequence: Synthetic polynucleotide
  source 1..138: mol_type = other RNA
ggctgtggtggggactgcgggttttagagctagaaatagcaagttaaaataaggctagtccgttatcaacttgaaaaagtggcaccgagtcggtgcaaggggtgttcactgctggcttccgcagtccccacttttttt

SEQ ID NO: 1753 - RNA, 138 nt, synthetic construct
  misc_feature 1..138: note = Description of Artificial Sequence: Synthetic polynucleotide
  source 1..138: mol_type = other RNA
ggctgtggtggggactgcgggttttagagctagaaatagcaagttaaaataaggctagtccgttatcaacttgaaaaagtggcaccgagtcggtgcggggtgttcactgctggcctccgcagtccccaccattttttt

SEQ ID NO: 1754 - RNA, 138 nt, synthetic construct
  misc_feature 1..138: note = Description of Artificial Sequence: Synthetic polynucleotide
  source 1..138: mol_type = other RNA
ggctgtggtggggactgcgggttttagagctagaaatagcaagttaaaataaggctagtccgttatcaacttgaaaaagtggcaccgagtcggtgcaggggtgttcactgctggcttccgcagtccccaccttttttt

SEQ ID NO: 1755 - RNA, 138 nt, synthetic construct
  misc_feature 1..138: note = Description of Artificial Sequence: Synthetic polynucleotide
  source 1..138: mol_type = other RNA
ggctgtggtggggactgcgggttttagagctagaaatagcaagttaaaataaggctagtccgttatcaacttgaaaaagtggcaccgagtcggtgcgggtgttcactgctggcttccgcagtccccaccacatttttt

SEQ ID NO: 1756 - RNA, 138 nt, synthetic construct
  misc_feature 1..138: note = Description of Artificial Sequence: Synthetic polynucleotide
  source 1..138: mol_type = other RNA
ggctgtggtggggactgcgggttttagagctagaaatagcaagttaaaataaggctagtccgttatcaacttgaaaaagtggcaccgagtcggtgcgccacgcccaaggggtgttcactgctggcttccgcagtcccc

SEQ ID NO: 1757 - RNA, 138 nt, synthetic construct
  misc_feature 1..138: note = Description of Artificial Sequence: Synthetic polynucleotide
  source 1..138: mol_type = other RNA
ggctgtggtggggactgcgggttttagagctagaaatagcaagttaaaataaggctagtccgttatcaacttgaaaaagtggcaccgagtcggtgcggtgttcactgctggcctccgcagtccccaccacattttttt

SEQ ID NO: 1758 - RNA, 138 nt, synthetic construct
  misc_feature 1..138: note = Description of Artificial Sequence: Synthetic polynucleotide
  source 1..138: mol_type = other RNA
ggctgtggtggggactgcgggttttagagctagaaatagcaagttaaaataaggctagtccgttatcaacttgaaaaagtggcaccgagtcggtgcgggtgttcactgctggcttccgcagtccccaccacttttttt

SEQ ID NO: 1759 - RNA, 139 nt, synthetic construct
  misc_feature 1..139: note = Description of Artificial Sequence: Synthetic polynucleotide
  source 1..139: mol_type = other RNA
ggctgtggtggggactgcgggttttagagctagaaatagcaagttaaaataaggctagtccgttatcaacttgaaaaagtggcaccgagtcggtgcggggtgttcactgctggcttccgcagtccccaccacatttttt

SEQ ID NO: 1760 - RNA, 139 nt, synthetic construct
  misc_feature 1..139: note = Description of Artificial Sequence: Synthetic polynucleotide
  source 1..139: mol_type = other RNA
ggctgtggtggggactgcgggttttagagctagaaatagcaagttaaaataaggctagtccgttatcaacttgaaaaagtggcaccgagtcggtgcgccacgcccaaggggtgttcactgctggcctccgcagtcccca

SEQ ID NO: 1761 - RNA, 139 nt, synthetic construct
  misc_feature 1..139: note = Description of Artificial Sequence: Synthetic polynucleotide
  source 1..139: mol_type = other RNA
ggctgtggtggggactgcgggttttagagctagaaatagcaagttaaaataaggctagtccgttatcaacttgaaaaagtggcaccgagtcggtgcacgcccaaggggtgttcactgctggcctccgcagtccccacca

SEQ ID NO: 1762 - RNA, 139 nt, synthetic construct
  misc_feature 1..139: note = Description of Artificial Sequence: Synthetic polynucleotide
  source 1..139: mol_type = other RNA
ggctgtggtggggactgcgggttttagagctagaaatagcaagttaaaataaggctagtccgttatcaacttgaaaaagtggcaccgagtcggtgcaggggtgttcactgctggcttccgcagtccccaccattttttt

SEQ ID NO: 1763 - RNA, 139 nt, synthetic construct
  misc_feature 1..139: note = Description of Artificial Sequence: Synthetic polynucleotide
  source 1..139: mol_type = other RNA
ggctgtggtggggactgcgggttttagagctagaaatagcaagttaaaataaggctagtccgttatcaacttgaaaaagtggcaccgagtcggtgcgcccaaggggtgttcactgctggcctccgcagtcccttttttt

SEQ ID NO: 1764 - RNA, 139 nt, synthetic construct
  misc_feature 1..139: note = Description of Artificial Sequence: Synthetic polynucleotide
  source 1..139: mol_type = other RNA
ggctgtggtggggactgcgggttttagagctagaaatagcaagttaaaataaggctagtccgttatcaacttgaaaaagtggcaccgagtcggtgcgggtgttcactgctggcttccgcagtccccaccacattttttt

SEQ ID NO: 1765 - RNA, 139 nt, synthetic construct
  misc_feature 1..139: note = Description of Artificial Sequence: Synthetic polynucleotide
  source 1..139: mol_type = other RNA
ggctgtggtggggactgcgggttttagagctagaaatagcaagttaaaataaggctagtccgttatcaacttgaaaaagtggcaccgagtcggtgcggtgttcactgctggcctccgcagtccccaccacagctttttt

SEQ ID NO: 1766 - RNA, 139 nt, synthetic construct
  misc_feature 1..139: note = Description of Artificial Sequence: Synthetic polynucleotide
  source 1..139: mol_type = other RNA
ggctgtggtggggactgcgggttttagagctagaaatagcaagttaaaataaggctagtccgttatcaacttgaaaaagtggcaccgagtcggtgcgcccaaggggtgttcactgctggcctccgcagtccccaccaca

SEQ ID NO: 1767 - RNA, 139 nt, synthetic construct
  misc_feature 1..139: note = Description of Artificial Sequence: Synthetic polynucleotide
  source 1..139: mol_type = other RNA
ggctgtggtggggactgcgggttttagagctagaaatagcaagttaaaataaggctagtccgttatcaacttgaaaaagtggcaccgagtcggtgcggtgttcactgctggcttccgcagtccccaccacagctttttt

SEQ ID NO: 1768 - RNA, 139 nt, synthetic construct
  misc_feature 1..139: note = Description of Artificial Sequence: Synthetic polynucleotide
  source 1..139: mol_type = other RNA
ggctgtggtggggactgcgggttttagagctagaaatagcaagttaaaataaggctagtccgttatcaacttgaaaaagtggcaccgagtcggtgcggggtgttcactgctggcctccgcagtccccaccacttttttt

SEQ ID NO: 1769 - RNA, 139 nt, synthetic construct
  misc_feature 1..139: note = Description of Artificial Sequence: Synthetic polynucleotide
  source 1..139: mol_type = other RNA
ggctgtggtggggactgcgggttttagagctagaaatagcaagttaaaataaggctagtccgttatcaacttgaaaaagtggcaccgagtcggtgcgccacgcccaaggggtgttcactgctggcttccgcagtcccca

SEQ ID NO: 1770 - RNA, 139 nt, synthetic construct
  misc_feature 1..139: note = Description of Artificial Sequence: Synthetic polynucleotide
  source 1..139: mol_type = other RNA
ggctgtggtggggactgcgggttttagagctagaaatagcaagttaaaataaggctagtccgttatcaacttgaaaaagtggcaccgagtcggtgcacgcccaaggggtgttcactgctggcttccgcagtccccacca

SEQ ID NO: 1771 - RNA, 139 nt, synthetic construct
  misc_feature 1..139: note = Description of Artificial Sequence: Synthetic polynucleotide
  source 1..139: mol_type = other RNA
ggctgtggtggggactgcgggttttagagctagaaatagcaagttaaaataaggctagtccgttatcaacttgaaaaagtggcaccgagtcggtgctgccacgcccaaggggtgttcactgctggcctccgcagtcccc

SEQ ID NO: 1772 - RNA, 139 nt, synthetic construct
  misc_feature 1..139: note = Description of Artificial Sequence: Synthetic polynucleotide
  source 1..139: mol_type = other RNA
ggctgtggtggggactgcgggttttagagctagaaatagcaagttaaaataaggctagtccgttatcaacttgaaaaagtggcaccgagtcggtgcaaggggtgttcactgctggcctccgcagtccccaccatttttt

SEQ ID NO: 1773 - RNA, 139 nt, synthetic construct
  misc_feature 1..139: note = Description of Artificial Sequence: Synthetic polynucleotide
  source 1..139: mol_type = other RNA
ggctgtggtggggactgcgggttttagagctagaaatagcaagttaaaataaggctagtccgttatcaacttgaaaaagtggcaccgagtcggtgcgcccaaggggtgttcactgctggcttccgcagtccccaccaca

SEQ ID NO: 1774 - RNA, 139 nt, synthetic construct
  misc_feature 1..139: note = Description of Artificial Sequence: Synthetic polynucleotide
  source 1..139: mol_type = other RNA
ggctgtggtggggactgcgggttttagagctagaaatagcaagttaaaataaggctagtccgttatcaacttgaaaaagtggcaccgagtcggtgcgggtgttcactgctggcctccgcagtccccaccacattttttt

SEQ ID NO: 1775 - RNA, 139 nt, synthetic construct
  misc_feature 1..139: note = Description of Artificial Sequence: Synthetic polynucleotide
  source 1..139: mol_type = other RNA
ggctgtggtggggactgcgggttttagagctagaaatagcaagttaaaataaggctagtccgttatcaacttgaaaaagtggcaccgagtcggtgcggggtgttcactgctggcctccgcagtccccaccacatttttt

SEQ ID NO: 1776 - RNA, 139 nt, synthetic construct
  misc_feature 1..139: note = Description of Artificial Sequence: Synthetic polynucleotide
  source 1..139: mol_type = other RNA
ggctgtggtggggactgcgggttttagagctagaaatagcaagttaaaataaggctagtccgttatcaacttgaaaaagtggcaccgagtcggtgcgcccaaggggtgttcactgctggcttccgcagtcccttttttt

SEQ ID NO: 1777 - RNA, 139 nt, synthetic construct
  misc_feature 1..139: note = Description of Artificial Sequence: Synthetic polynucleotide
  source 1..139: mol_type = other RNA
ggctgtggtggggactgcgggttttagagctagaaatagcaagttaaaataaggctagtccgttatcaacttgaaaaagtggcaccgagtcggtgctgccacgcccaaggggtgttcactgctggcttccgcagtcccc

SEQ ID NO: 1778 - RNA, 139 nt, synthetic construct
  misc_feature 1..139: note = Description of Artificial Sequence: Synthetic polynucleotide
  source 1..139: mol_type = other RNA
ggctgtggtggggactgcgggttttagagctagaaatagcaagttaaaataaggctagtccgttatcaacttgaaaaagtggcaccgagtcggtgcaaggggtgttcactgctggcttccgcagtccccaccatttttt

SEQ ID NO: 1779 - RNA, 139 nt, synthetic construct
  misc_feature 1..139: note = Description of Artificial Sequence: Synthetic polynucleotide
  source 1..139: mol_type = other RNA
ggctgtggtggggactgcgggttttagagctagaaatagcaagttaaaataaggctagtccgttatcaacttgaaaaagtggcaccgagtcggtgcaaggggtgttcactgctggcttccgcagtccccaccttttttt

SEQ ID NO: 1780 - RNA, 139 nt, synthetic construct
  misc_feature 1..139: note = Description of Artificial Sequence: Synthetic polynucleotide
  source 1..139: mol_type = other RNA
ggctgtggtggggactgcgggttttagagctagaaatagcaagttaaaataaggctagtccgttatcaacttgaaaaagtggcaccgagtcggtgcaggggtgttcactgctggcctccgcagtccccaccattttttt

SEQ ID NO: 1781 - RNA, 139 nt, synthetic construct
  misc_feature 1..139: note = Description of Artificial Sequence: Synthetic polynucleotide
  source 1..139: mol_type = other RNA
ggctgtggtggggactgcgggttttagagctagaaatagcaagttaaaataaggctagtccgttatcaacttgaaaaagtggcaccgagtcggtgcaaggggtgttcactgctggcctccgcagtccccaccttttttt

SEQ ID NO: 1782 - RNA, 139 nt, synthetic construct
  misc_feature 1..139: note = Description of Artificial Sequence: Synthetic polynucleotide
  source 1..139: mol_type = other RNA
ggctgtggtggggactgcgggttttagagctagaaatagcaagttaaaataaggctagtccgttatcaacttgaaaaagtggcaccgagtcggtgcggggtgttcactgctggcttccgcagtccccaccacttttttt

SEQ ID NO: 1783 - RNA, 140 nt, synthetic construct
  misc_feature 1..140: note = Description of Artificial Sequence: Synthetic polynucleotide
  source 1..140: mol_type = other RNA
ggctgtggtggggactgcgggttttagagctagaaatagcaagttaaaataaggctagtccgttatcaacttgaaaaagtggcaccgagtcggtgcgcccaaggggtgttcactgctggcttccgcagtccccttttttt

SEQ ID NO: 1784 - RNA, 140 nt, synthetic construct
  misc_feature 1..140: note = Description of Artificial Sequence: Synthetic polynucleotide
  source 1..140: mol_type = other RNA
ggctgtggtggggactgcgggttttagagctagaaatagcaagttaaaataaggctagtccgttatcaacttgaaaaagtggcaccgagtcggtgcgcccaaggggtgttcactgctggcctccgcagtccccttttttt

SEQ ID NO: 1785 - RNA, 140 nt, synthetic construct
  misc_feature 1..140: note = Description of Artificial Sequence: Synthetic polynucleotide
  source 1..140: mol_type = other RNA
ggctgtggtggggactgcgggttttagagctagaaatagcaagttaaaataaggctagtccgttatcaacttgaaaaagtggcaccgagtcggtgcgccacgcccaaggggtgttcactgctggcctccgcagtccccac

SEQ ID NO: 1786 - RNA, 140 nt, synthetic construct
  misc_feature 1..140: note = Description of Artificial Sequence: Synthetic polynucleotide
  source 1..140: mol_type = other RNA
ggctgtggtggggactgcgggttttagagctagaaatagcaagttaaaataaggctagtccgttatcaacttgaaaaagtggcaccgagtcggtgcactgccacgcccaaggggtgttcactgctggcttccgcagtccc

SEQ ID NO: 1787 - RNA, 140 nt, synthetic construct
  misc_feature 1..140: note = Description of Artificial Sequence: Synthetic polynucleotide
  source 1..140: mol_type = other RNA
ggctgtggtggggactgcgggttttagagctagaaatagcaagttaaaataaggctagtccgttatcaacttgaaaaagtggcaccgagtcggtgcggggtgttcactgctggcttccgcagtccccaccacattttttt

SEQ ID NO: 1788 - RNA, 140 nt, synthetic construct
  misc_feature 1..140: note = Description of Artificial Sequence: Synthetic polynucleotide
  source 1..140: mol_type = other RNA
ggctgtggtggggactgcgggttttagagctagaaatagcaagttaaaataaggctagtccgttatcaacttgaaaaagtggcaccgagtcggtgcacgcccaaggggtgttcactgctggcttccgcagtccccaccac

SEQ ID NO: 1789 - RNA, 140 nt, synthetic construct
  misc_feature 1..140: note = Description of Artificial Sequence: Synthetic polynucleotide
  source 1..140: mol_type = other RNA
ggctgtggtggggactgcgggttttagagctagaaatagcaagttaaaataaggctagtccgttatcaacttgaaaaagtggcaccgagtcggtgcactgccacgcccaaggggtgttcactgctggcctccgcagtccc

SEQ ID NO: 1790 - RNA, 140 nt, synthetic construct
  misc_feature 1..140: note = Description of Artificial Sequence: Synthetic polynucleotide
  source 1..140: mol_type = other RNA
ggctgtggtggggactgcgggttttagagctagaaatagcaagttaaaataaggctagtccgttatcaacttgaaaaagtggcaccgagtcggtgcaaggggtgttcactgctggcttccgcagtccccaccattttttt

SEQ ID NO: 1791 - RNA, 140 nt, synthetic construct
  misc_feature 1..140: note = Description of Artificial Sequence: Synthetic polynucleotide
  source 1..140: mol_type = other RNA
ggctgtggtggggactgcgggttttagagctagaaatagcaagttaaaataaggctagtccgttatcaacttgaaaaagtggcaccgagtcggtgcaggggtgttcactgctggcctccgcagtccccaccacttttttt

SEQ ID NO: 1792 - RNA, 140 nt, synthetic construct
  misc_feature 1..140: note = Description of Artificial Sequence: Synthetic polynucleotide
  source 1..140: mol_type = other RNA
ggctgtggtggggactgcgggttttagagctagaaatagcaagttaaaataaggctagtccgttatcaacttgaaaaagtggcaccgagtcggtgcgccacgcccaaggggtgttcactgctggcttccgcagtccccac

SEQ ID NO: 1793 - RNA, 140 nt, synthetic construct
  misc_feature 1..140: note = Description of Artificial Sequence: Synthetic polynucleotide
  source 1..140: mol_type = other RNA
ggctgtggtggggactgcgggttttagagctagaaatagcaagttaaaataaggctagtccgttatcaacttgaaaaagtggcaccgagtcggtgcaaggggtgttcactgctggcctccgcagtccccaccattttttt

SEQ ID NO: 1794 - RNA, 140 nt, synthetic construct
  misc_feature 1..140: note = Description of Artificial Sequence: Synthetic polynucleotide
  source 1..140: mol_type = other RNA
ggctgtggtggggactgcgggttttagagctagaaatagcaagttaaaataaggctagtccgttatcaacttgaaaaagtggcaccgagtcggtgcgggtgttcactgctggcctccgcagtccccaccacagctttttt

SEQ ID NO: 1795 - RNA, 140 nt, synthetic construct
  misc_feature 1..140: note = Description of Artificial Sequence: Synthetic polynucleotide
  source 1..140: mol_type = other RNA
ggctgtggtggggactgcgggttttagagctagaaatagcaagttaaaataaggctagtccgttatcaacttgaaaaagtggcaccgagtcggtgcaggggtgttcactgctggcttccgcagtccccaccacttttttt

SEQ ID NO: 1796 - RNA, 140 nt, synthetic construct
  misc_feature 1..140: note = Description of Artificial Sequence: Synthetic polynucleotide
  source 1..140: mol_type = other RNA
ggctgtggtggggactgcgggttttagagctagaaatagcaagttaaaataaggctagtccgttatcaacttgaaaaagtggcaccgagtcggtgctgccacgcccaaggggtgttcactgctggcttccgcagtcccca

SEQ ID NO: 1797 - RNA, 140 nt, synthetic construct
  misc_feature 1..140: note = Description of Artificial Sequence: Synthetic polynucleotide
  source 1..140: mol_type = other RNA
ggctgtggtggggactgcgggttttagagctagaaatagcaagttaaaataaggctagtccgttatcaacttgaaaaagtggcaccgagtcggtgcaggggtgttcactgctggcttccgcagtccccaccacatttttt

SEQ ID NO: 1798 - RNA, 140 nt, synthetic construct
  misc_feature 1..140: note = Description of Artificial Sequence: Synthetic polynucleotide
  source 1..140: mol_type = other RNA
ggctgtggtggggactgcgggttttagagctagaaatagcaagttaaaataaggctagtccgttatcaacttgaaaaagtggcaccgagtcggtgctgccacgcccaaggggtgttcactgctggcctccgcagtcccca

SEQ ID NO: 1799 - RNA, 140 nt, synthetic construct
  misc_feature 1..140: note = Description of Artificial Sequence: Synthetic polynucleotide
  source 1..140: mol_type = other RNA
ggctgtggtggggactgcgggttttagagctagaaatagcaagttaaaataaggctagtccgttatcaacttgaaaaagtggcaccgagtcggtgcaggggtgttcactgctggcctccgcagtccccaccacatttttt

SEQ ID NO: 1800 - RNA, 140 nt, synthetic construct
  misc_feature 1..140: note = Description of Artificial Sequence: Synthetic polynucleotide
  source 1..140: mol_type = other RNA
ggctgtggtggggactgcgggttttagagctagaaatagcaagttaaaataaggctagtccgttatcaacttgaaaaagtggcaccgagtcggtgcgggtgttcactgctggcttccgcagtccccaccacagctttttt

SEQ ID NO: 1801 - RNA, 140 nt, synthetic construct
  misc_feature 1..140: note = Description of Artificial Sequence: Synthetic polynucleotide
  source 1..140: mol_type = other RNA
ggctgtggtggggactgcgggttttagagctagaaatagcaagttaaaataaggctagtccgttatcaacttgaaaaagtggcaccgagtcggtgcacgcccaaggggtgttcactgctggcctccgcagtccccaccac

SEQ ID NO: 1802 - RNA, 140 nt, synthetic construct
  misc_feature 1..140: note = Description of Artificial Sequence: Synthetic polynucleotide
  source 1..140: mol_type = other RNA
ggctgtggtggggactgcgggttttagagctagaaatagcaagttaaaataaggctagtccgttatcaacttgaaaaagtggcaccgagtcggtgcggggtgttcactgctggcctccgcagtccccaccacattttttt

SEQ ID NO: 1803 - RNA, 141 nt, synthetic construct
  misc_feature 1..141: note = Description of Artificial Sequence: Synthetic polynucleotide
  source 1..141: mol_type = other RNA
ggctgtggtggggactgcgggttttagagctagaaatagcaagttaaaataaggctagtccgttatcaacttgaaaaagtggcaccgagtcggtgctgccacgcccaaggggtgttcactgctggcctccgcagtccccac

SEQ ID NO: 1804 - RNA, 141 nt, synthetic construct
  misc_feature 1..141: note = Description of Artificial Sequence: Synthetic polynucleotide
  source 1..141: mol_type = other RNA
ggctgtggtggggactgcgggttttagagctagaaatagcaagttaaaataaggctagtccgttatcaacttgaaaaagtggcaccgagtcggtgcgactgccacgcccaaggggtgttcactgctggcttccgcagtccc

SEQ ID NO: 1805 - RNA, 141 nt, synthetic construct
  misc_feature 1..141: note = Description of Artificial Sequence: Synthetic polynucleotide
  source 1..141: mol_type = other RNA
ggctgtggtggggactgcgggttttagagctagaaatagcaagttaaaataaggctagtccgttatcaacttgaaaaagtggcaccgagtcggtgcactgccacgcccaaggggtgttcactgctggcctccgcagtcccc

SEQ ID NO: 1806 - RNA, 141 nt, synthetic construct
  misc_feature 1..141: note = Description of Artificial Sequence: Synthetic polynucleotide
  source 1..141: mol_type = other RNA
ggctgtggtggggactgcgggttttagagctagaaatagcaagttaaaataaggctagtccgttatcaacttgaaaaagtggcaccgagtcggtgcacgcccaaggggtgttcactgctggcttccgcagtccccaccaca

SEQ ID NO: 1807 - RNA, 141 nt, synthetic construct
  misc_feature 1..141: note = Description of Artificial Sequence: Synthetic polynucleotide
  source 1..141: mol_type = other RNA
ggctgtggtggggactgcgggttttagagctagaaatagcaagttaaaataaggctagtccgttatcaacttgaaaaagtggcaccgagtcggtgcgccacgcccaaggggtgttcactgctggcttccgcagtccccacc

SEQ ID NO: 1808 - RNA, 141 nt, synthetic construct
  misc_feature 1..141: note = Description of Artificial Sequence: Synthetic polynucleotide
  source 1..141: mol_type = other RNA
ggctgtggtggggactgcgggttttagagctagaaatagcaagttaaaataaggctagtccgttatcaacttgaaaaagtggcaccgagtcggtgcaaggggtgttcactgctggcttccgcagtccccaccacatttttt

SEQ ID NO: 1809 - RNA, 141 nt, synthetic construct
  misc_feature 1..141: note = Description of Artificial Sequence: Synthetic polynucleotide
  source 1..141: mol_type = other RNA
ggctgtggtggggactgcgggttttagagctagaaatagcaagttaaaataaggctagtccgttatcaacttgaaaaagtggcaccgagtcggtgcaaggggtgttcactgctggcttccgcagtccccaccacttttttt

SEQ ID NO: 1810 - RNA, 141 nt, synthetic construct
  misc_feature 1..141: note = Description of Artificial Sequence: Synthetic polynucleotide
  source 1..141: mol_type = other RNA
ggctgtggtggggactgcgggttttagagctagaaatagcaagttaaaataaggctagtccgttatcaacttgaaaaagtggcaccgagtcggtgcacgcccaaggggtgttcactgctggcctccgcagtccccaccaca

SEQ ID NO: 1811 - RNA, 141 nt, synthetic construct
  misc_feature 1..141: note = Description of Artificial Sequence: Synthetic polynucleotide
  source 1..141: mol_type = other RNA
ggctgtggtggggactgcgggttttagagctagaaatagcaagttaaaataaggctagtccgttatcaacttgaaaaagtggcaccgagtcggtgcgcccaaggggtgttcactgctggcttccgcagtccccattttttt

SEQ ID NO: 1812 - RNA, 141 nt, synthetic construct
  misc_feature 1..141: note = Description of Artificial Sequence: Synthetic polynucleotide
  source 1..141: mol_type = other RNA
ggctgtggtggggactgcgggttttagagctagaaatagcaagttaaaataaggctagtccgttatcaacttgaaaaagtggcaccgagtcggtgcacgcccaaggggtgttcactgctggcctccgcagtcccttttttt

SEQ ID NO: 1813 - RNA, 141 nt, synthetic construct
  misc_feature 1..141: note = Description of Artificial Sequence: Synthetic polynucleotide
  source 1..141: mol_type = other RNA
ggctgtggtggggactgcgggttttagagctagaaatagcaagttaaaataaggctagtccgttatcaacttgaaaaagtggcaccgagtcggtgcactgccacgcccaaggggtgttcactgctggcttccgcagtcccc

SEQ ID NO: 1814 - RNA, 141 nt, synthetic construct
  misc_feature 1..141: note = Description of Artificial Sequence: Synthetic polynucleotide
  source 1..141: mol_type = other RNA
ggctgtggtggggactgcgggttttagagctagaaatagcaagttaaaataaggctagtccgttatcaacttgaaaaagtggcaccgagtcggtgcaaggggtgttcactgctggcctccgcagtccccaccacatttttt

SEQ ID NO: 1815 - RNA, 141 nt, synthetic construct
  misc_feature 1..141: note = Description of Artificial Sequence: Synthetic polynucleotide
  source 1..141: mol_type = other RNA
ggctgtggtggggactgcgggttttagagctagaaatagcaagttaaaataaggctagtccgttatcaacttgaaaaagtggcaccgagtcggtgctgccacgcccaaggggtgttcactgctggcttccgcagtccccac

SEQ ID NO: 1816 - RNA, 141 nt, synthetic construct
  misc_feature 1..141: note = Description of Artificial Sequence: Synthetic polynucleotide
  source 1..141: mol_type = other RNA
ggctgtggtggggactgcgggttttagagctagaaatagcaagttaaaataaggctagtccgttatcaacttgaaaaagtggcaccgagtcggtgcggggtgttcactgctggcctccgcagtccccaccacagctttttt

SEQ ID NO: 1817 - RNA, 141 nt, synthetic construct
  misc_feature 1..141: note = Description of Artificial Sequence: Synthetic polynucleotide
  source 1..141: mol_type = other RNA
ggctgtggtggggactgcgggttttagagctagaaatagcaagttaaaataaggctagtccgttatcaacttgaaaaagtggcaccgagtcggtgcaggggtgttcactgctggcctccgcagtccccaccacattttttt

SEQ ID NO: 1818 - RNA, 141 nt, synthetic construct
  misc_feature 1..141: note = Description of Artificial Sequence: Synthetic polynucleotide
  source 1..141: mol_type = other RNA
ggctgtggtggggactgcgggttttagagctagaaatagcaagttaaaataaggctagtccgttatcaacttgaaaaagtggcaccgagtcggtgcggggtgttcactgctggcttccgcagtccccaccacagctttttt

SEQ ID NO: 1819 - RNA, 141 nt, synthetic construct
  misc_feature 1..141: note = Description of Artificial Sequence: Synthetic polynucleotide
  source 1..141: mol_type = other RNA
ggctgtggtggggactgcgggttttagagctagaaatagcaagttaaaataaggctagtccgttatcaacttgaaaaagtggcaccgagtcggtgcgactgccacgcccaaggggtgttcactgctggcctccgcagtccc

SEQ ID NO: 1820 - RNA, 141 nt, synthetic construct
  misc_feature 1..141: note = Description of Artificial Sequence: Synthetic polynucleotide
  source 1..141: mol_type = other RNA
ggctgtggtggggactgcgggttttagagctagaaatagcaagttaaaataaggctagtccgttatcaacttgaaaaagtggcaccgagtcggtgcacgcccaaggggtgttcactgctggcttccgcagtcccttttttt

SEQ ID NO: 1821 - RNA, 141 nt, synthetic construct
  misc_feature 1..141: note = Description of Artificial Sequence: Synthetic polynucleotide
  source 1..141: mol_type = other RNA
ggctgtggtggggactgcgggttttagagctagaaatagcaagttaaaataaggctagtccgttatcaacttgaaaaagtggcaccgagtcggtgcgcccaaggggtgttcactgctggcctccgcagtccccattttttt

SEQ ID NO: 1822 - RNA, 141 nt, synthetic construct
  misc_feature 1..141: note = Description of Artificial Sequence: Synthetic polynucleotide
  source 1..141: mol_type = other RNA
ggctgtggtggggactgcgggttttagagctagaaatagcaagttaaaataaggctagtccgttatcaacttgaaaaagtggcaccgagtcggtgcaggggtgttcactgctggcttccgcagtccccaccacattttttt

SEQ ID NO: 1823 - RNA, 141 nt, synthetic construct
  misc_feature 1..141: note = Description of Artificial Sequence: Synthetic polynucleotide
  source 1..141: mol_type = other RNA
ggctgtggtggggactgcgggttttagagctagaaatagcaagttaaaataaggctagtccgttatcaacttgaaaaagtggcaccgagtcggtgcaaggggtgttcactgctggcctccgcagtccccaccacttttttt

SEQ ID NO: 1824 - RNA, 141 nt, synthetic construct
  misc_feature 1..141: note = Description of Artificial Sequence: Synthetic polynucleotide
  source 1..141: mol_type = other RNA
ggctgtggtggggactgcgggttttagagctagaaatagcaagttaaaataaggctagtccgttatcaacttgaaaaagtggcaccgagtcggtgcgccacgcccaaggggtgttcactgctggcctccgcagtccccacc

SEQ ID NO: 1825 - RNA, 142 nt, synthetic construct
  misc_feature 1..142: note = Description of Artificial Sequence: Synthetic polynucleotide
  source 1..142: mol_type = other RNA
ggctgtggtggggactgcgggttttagagctagaaatagcaagttaaaataaggctagtccgttatcaacttgaaaaagtggcaccgagtcggtgctgccacgcccaaggggtgttcactgctggcttccgcagtccccacc

SEQ ID NO: 1826 - RNA, 142 nt, synthetic construct
  misc_feature 1..142: note = Description of Artificial Sequence: Synthetic polynucleotide
  source 1..142: mol_type = other RNA
ggctgtggtggggactgcgggttttagagctagaaatagcaagttaaaataaggctagtccgttatcaacttgaaaaagtggcaccgagtcggtgcgccacgcccaaggggtgttcactgctggcctccgcagtccccacca

SEQ ID NO: 1827 - RNA, 142 nt, synthetic construct
  misc_feature 1..142: note = Description of Artificial Sequence: Synthetic polynucleotide
  source 1..142: mol_type = other RNA
ggctgtggtggggactgcgggttttagagctagaaatagcaagttaaaataaggctagtccgttatcaacttgaaaaagtggcaccgagtcggtgcacgcccaaggggtgttcactgctggcctccgcagtccccttttttt

SEQ ID NO: 1828 - RNA, 142 nt, synthetic construct
  misc_feature 1..142: note = Description of Artificial Sequence: Synthetic polynucleotide
  source 1..142: mol_type = other RNA
ggctgtggtggggactgcgggttttagagctagaaatagcaagttaaaataaggctagtccgttatcaacttgaaaaagtggcaccgagtcggtgcaggggtgttcactgctggcttccgcagtccccaccacagctttttt

SEQ ID NO: 1829 - RNA, 142 nt, synthetic construct
  misc_feature 1..142: note = Description of Artificial Sequence: Synthetic polynucleotide
  source 1..142: mol_type = other RNA
ggctgtggtggggactgcgggttttagagctagaaatagcaagttaaaataaggctagtccgttatcaacttgaaaaagtggcaccgagtcggtgcacgcccaaggggtgttcactgctggcttccgcagtccccttttttt

SEQ ID NO: 1830 - RNA, 142 nt, synthetic construct
  misc_feature 1..142: note = Description of Artificial Sequence: Synthetic polynucleotide
  source 1..142: mol_type = other RNA
ggctgtggtggggactgcgggttttagagctagaaatagcaagttaaaataaggctagtccgttatcaacttgaaaaagtggcaccgagtcggtgctgccacgcccaaggggtgttcactgctggcctccgcagtccccacc

SEQ ID NO: 1831 - RNA, 142 nt, synthetic construct
  misc_feature 1..142: note = Description of Artificial Sequence: Synthetic polynucleotide
  source 1..142: mol_type = other RNA
ggctgtggtggggactgcgggttttagagctagaaatagcaagttaaaataaggctagtccgttatcaacttgaaaaagtggcaccgagtcggtgcgcccaaggggtgttcactgctggcttccgcagtccccacttttttt

SEQ ID NO: 1832 - RNA, 142 nt, synthetic construct
  misc_feature 1..142: note = Description of Artificial Sequence: Synthetic polynucleotide
  source 1..142: mol_type = other RNA
ggctgtggtggggactgcgggttttagagctagaaatagcaagttaaaataaggctagtccgttatcaacttgaaaaagtggcaccgagtcggtgcgactgccacgcccaaggggtgttcactgctggcctccgcagtcccc

SEQ ID NO: 1833 - RNA, 142 nt, synthetic construct
  misc_feature 1..142: note = Description of Artificial Sequence: Synthetic polynucleotide
  source 1..142: mol_type = other RNA
ggctgtggtggggactgcgggttttagagctagaaatagcaagttaaaataaggctagtccgttatcaacttgaaaaagtggcaccgagtcggtgctgactgccacgcccaaggggtgttcactgctggcttccgcagtccc

SEQ ID NO: 1834 - RNA, 142 nt, synthetic construct
  misc_feature 1..142: note = Description of Artificial Sequence: Synthetic polynucleotide
  source 1..142: mol_type = other RNA
ggctgtggtggggactgcgggttttagagctagaaatagcaagttaaaataaggctagtccgttatcaacttgaaaaagtggcaccgagtcggtgcgcccaaggggtgttcactgctggcctccgcagtccccacttttttt

SEQ ID NO: 1835 - RNA, 142 nt, synthetic construct
  misc_feature 1..142: note = Description of Artificial Sequence: Synthetic polynucleotide
  source 1..142: mol_type = other RNA
ggctgtggtggggactgcgggttttagagctagaaatagcaagttaaaataaggctagtccgttatcaacttgaaaaagtggcaccgagtcggtgctgactgccacgcccaaggggtgttcactgctggcctccgcagtccc

SEQ ID NO: 1836 - RNA, 142 nt, synthetic construct
  misc_feature 1..142: note = Description of Artificial Sequence: Synthetic polynucleotide
  source 1..142: mol_type = other RNA
ggctgtggtggggactgcgggttttagagctagaaatagcaagttaaaataaggctagtccgttatcaacttgaaaaagtggcaccgagtcggtgcaaggggtgttcactgctggcctccgcagtccccaccacattttttt

SEQ ID NO: 1837 - RNA, 142 nt, synthetic construct
  misc_feature 1..142: note = Description of Artificial Sequence: Synthetic polynucleotide
  source 1..142: mol_type = other RNA
ggctgtggtggggactgcgggttttagagctagaaatagcaagttaaaataaggctagtccgttatcaacttgaaaaagtggcaccgagtcggtgcgccacgcccaaggggtgttcactgctggcttccgcagtccccacca

SEQ ID NO: 1838 - RNA, 142 nt, synthetic construct
  misc_feature 1..142: note = Description of Artificial Sequence: Synthetic polynucleotide
  source 1..142: mol_type = other RNA
ggctgtggtggggactgcgggttttagagctagaaatagcaagttaaaataaggctagtccgttatcaacttgaaaaagtggcaccgagtcggtgcaggggtgttcactgctggcctccgcagtccccaccacagctttttt

SEQ ID NO: 1839 - RNA, 142 nt, synthetic construct
  misc_feature 1..142: note = Description of Artificial Sequence: Synthetic polynucleotide
  source 1..142: mol_type = other RNA
ggctgtggtggggactgcgggttttagagctagaaatagcaagttaaaataaggctagtccgttatcaacttgaaaaagtggcaccgagtcggtgcaaggggtgttcactgctggcttccgcagtccccaccacattttttt

SEQ ID NO: 1840 - RNA, 142 nt, synthetic construct
  misc_feature 1..142: note = Description of Artificial Sequence: Synthetic polynucleotide
  source 1..142: mol_type = other RNA
ggctgtggtggggactgcgggttttagagctagaaatagcaagttaaaataaggctagtccgttatcaacttgaaaaagtggcaccgagtcggtgcactgccacgcccaaggggtgttcactgctggcttccgcagtcccca

SEQ ID NO: 1841 - RNA, 142 nt, synthetic construct
  misc_feature 1..142: note = Description of Artificial Sequence: Synthetic polynucleotide
  source 1..142: mol_type = other RNA
ggctgtggtggggactgcgggttttagagctagaaatagcaagttaaaataaggctagtccgttatcaacttgaaaaagtggcaccgagtcggtgcgactgccacgcccaaggggtgttcactgctggcttccgcagtcccc

SEQ ID NO: 1842 - RNA, 142 nt, synthetic construct
  misc_feature 1..142: note = Description of Artificial Sequence: Synthetic polynucleotide
  source 1..142: mol_type = other RNA
ggctgtggtggggactgcgggttttagagctagaaatagcaagttaaaataaggctagtccgttatcaacttgaaaaagtggcaccgagtcggtgcactgccacgcccaaggggtgttcactgctggcctccgcagtcccca

SEQ ID NO: 1843 - RNA, 143 nt, synthetic construct
  misc_feature 1..143: note = Description of Artificial Sequence: Synthetic polynucleotide
  source 1..143: mol_type = other RNA
ggctgtggtggggactgcgggttttagagctagaaatagcaagttaaaataaggctagtccgttatcaacttgaaaaagtggcaccgagtcggtgcacgcccaaggggtgttcactgctggcttccgcagtccccattttttt

SEQ ID NO: 1844 - RNA, 143 nt, synthetic construct
  misc_feature 1..143: note = Description of Artificial Sequence: Synthetic polynucleotide
  source 1..143: mol_type = other RNA
ggctgtggtggggactgcgggttttagagctagaaatagcaagttaaaataaggctagtccgttatcaacttgaaaaagtggcaccgagtcggtgcgcccaaggggtgttcactgctggcctccgcagtccccaccttttttt

SEQ ID NO: 1845 - RNA, 143 nt, synthetic construct
  misc_feature 1..143: note = Description of Artificial Sequence: Synthetic polynucleotide
  source 1..143: mol_type = other RNA
ggctgtggtggggactgcgggttttagagctagaaatagcaagttaaaataaggctagtccgttatcaacttgaaaaagtggcaccgagtcggtgcgtgactgccacgcccaaggggtgttcactgctggcttccgcagtccc

SEQ ID NO: 1846 - RNA, 143 nt, synthetic construct
  misc_feature 1..143: note = Description of Artificial Sequence: Synthetic polynucleotide
  source 1..143: mol_type = other RNA
ggctgtggtggggactgcgggttttagagctagaaatagcaagttaaaataaggctagtccgttatcaacttgaaaaagtggcaccgagtcggtgctgccacgcccaaggggtgttcactgctggcctccgcagtccccacca

SEQ ID NO: 1847 - RNA, 143 nt, synthetic construct
  misc_feature 1..143: note = Description of Artificial Sequence: Synthetic polynucleotide
  source 1..143: mol_type = other RNA
ggctgtggtggggactgcgggttttagagctagaaatagcaagttaaaataaggctagtccgttatcaacttgaaaaagtggcaccgagtcggtgcgccacgcccaaggggtgttcactgctggcctccgcagtccccaccac

SEQ ID NO: 1848 - RNA, 143 nt, synthetic construct
  misc_feature 1..143: note = Description of Artificial Sequence: Synthetic polynucleotide
  source 1..143: mol_type = other RNA
ggctgtggtggggactgcgggttttagagctagaaatagcaagttaaaataaggctagtccgttatcaacttgaaaaagtggcaccgagtcggtgcgtgactgccacgcccaaggggtgttcactgctggcctccgcagtccc

SEQ ID NO: 1849 - RNA, 143 nt, synthetic construct
  misc_feature 1..143: note = Description of Artificial Sequence: Synthetic polynucleotide
  source 1..143: mol_type = other RNA
ggctgtggtggggactgcgggttttagagctagaaatagcaagttaaaataaggctagtccgttatcaacttgaaaaagtggcaccgagtcggtgcaaggggtgttcactgctggcctccgcagtccccaccacagctttttt

SEQ ID NO: 1850 - RNA, 143 nt, synthetic construct
  misc_feature 1..143: note = Description of Artificial Sequence: Synthetic polynucleotide
  source 1..143: mol_type = other RNA
ggctgtggtggggactgcgggttttagagctagaaatagcaagttaaaataaggctagtccgttatcaacttgaaaaagtggcaccgagtcggtgctgactgccacgcccaaggggtgttcactgctggcctccgcagtcccc

SEQ ID NO: 1851 - RNA, 143 nt, synthetic construct
  misc_feature 1..143: note = Description of Artificial Sequence: Synthetic polynucleotide
  source 1..143: mol_type = other RNA
ggctgtggtggggactgcgggttttagagctagaaatagcaagttaaaataaggctagtccgttatcaacttgaaaaagtggcaccgagtcggtgcgcccaaggggtgttcactgctggcttccgcagtccccaccttttttt

SEQ ID NO: 1852 - RNA, 143 nt, synthetic construct
  misc_feature 1..143: note = Description of Artificial Sequence: Synthetic polynucleotide
  source 1..143: mol_type = other RNA
ggctgtggtggggactgcgggttttagagctagaaatagcaagttaaaataaggctagtccgttatcaacttgaaaaagtggcaccgagtcggtgctgactgccacgcccaaggggtgttcactgctggcttccgcagtcccc

SEQ ID NO: 1853 - RNA, 143 nt, synthetic construct
  misc_feature 1..143: note = Description of Artificial Sequence: Synthetic polynucleotide
  source 1..143: mol_type = other RNA
ggctgtggtggggactgcgggttttagagctagaaatagcaagttaaaataaggctagtccgttatcaacttgaaaaagtggcaccgagtcggtgcaaggggtgttcactgctggcttccgcagtccccaccacagctttttt

SEQ ID NO: 1854 - RNA, 143 nt, synthetic construct
  misc_feature 1..143: note = Description of Artificial Sequence: Synthetic polynucleotide
  source 1..143: mol_type = other RNA
ggctgtggtggggactgcgggttttagagctagaaatagcaagttaaaataaggctagtccgttatcaacttgaaaaagtggcaccgagtcggtgcacgcccaaggggtgttcactgctggcctccgcagtccccattttttt

SEQ ID NO: 1855 - RNA, 143 nt, synthetic construct
  misc_feature 1..143: note = Description of Artificial Sequence: Synthetic polynucleotide
  source 1..143: mol_type = other RNA
ggctgtggtggggactgcgggttttagagctagaaatagcaagttaaaataaggctagtccgttatcaacttgaaaaagtggcaccgagtcggtgcgactgccacgcccaaggggtgttcactgctggcctccgcagtcccca

SEQ ID NO: 1856 - RNA, 143 nt, synthetic construct
  misc_feature 1..143: note = Description of Artificial Sequence: Synthetic polynucleotide
  source 1..143: mol_type = other RNA
ggctgtggtggggactgcgggttttagagctagaaatagcaagttaaaataaggctagtccgttatcaacttgaaaaagtggcaccgagtcggtgcactgccacgcccaaggggtgttcactgctggcttccgcagtccccac

SEQ ID NO: 1857 - RNA, 143 nt, synthetic construct
  misc_feature 1..143: note = Description of Artificial Sequence: Synthetic polynucleotide
  source 1..143: mol_type = other RNA
ggctgtggtggggactgcgggttttagagctagaaatagcaagttaaaataaggctagtccgttatcaacttgaaaaagtggcaccgagtcggtgcgccacgcccaaggggtgttcactgctggcttccgcagtccccaccac

SEQ ID NO: 1858 - RNA, 143 nt, synthetic construct
  misc_feature 1..143: note = Description of Artificial Sequence: Synthetic polynucleotide
  source 1..143: mol_type = other RNA
ggctgtggtggggactgcgggttttagagctagaaatagcaagttaaaataaggctagtccgttatcaacttgaaaaagtggcaccgagtcggtgcgactgccacgcccaaggggtgttcactgctggcttccgcagtcccca

SEQ ID NO: 1859 - RNA, 143 nt, synthetic construct
  misc_feature 1..143: note = Description of Artificial Sequence: Synthetic polynucleotide
  source 1..143: mol_type = other RNA
ggctgtggtggggactgcgggttttagagctagaaatagcaagttaaaataaggctagtccgttatcaacttgaaaaagtggcaccgagtcggtgcactgccacgcccaaggggtgttcactgctggcctccgcagtccccac

SEQ ID NO: 1860 - RNA, 143 nt, synthetic construct
  misc_feature 1..143: note = Description of Artificial Sequence: Synthetic polynucleotide
  source 1..143: mol_type = other RNA
ggctgtggtggggactgcgggttttagagctagaaatagcaagttaaaataaggctagtccgttatcaacttgaaaaagtggcaccgagtcggtgctgccacgcccaaggggtgttcactgctggcttccgcagtccccacca

SEQ ID NO: 1861 - RNA, 144 nt, synthetic construct
  misc_feature 1..144: note = Description of Artificial Sequence: Synthetic polynucleotide
  source 1..144: mol_type = other RNA
ggctgtggtggggactgcgggttttagagctagaaatagcaagttaaaataaggctagtccgttatcaacttgaaaaagtggcaccgagtcggtgcgtgactgccacgcccaaggggtgttcactgctggcctccgcagtcccc

SEQ ID NO: 1862 - RNA, 144 nt, synthetic construct
  misc_feature 1..144: note = Description of Artificial Sequence: Synthetic polynucleotide
  source 1..144: mol_type = other RNA
ggctgtggtggggactgcgggttttagagctagaaatagcaagttaaaataaggctagtccgttatcaacttgaaaaagtggcaccgagtcggtgcgactgccacgcccaaggggtgttcactgctggcttccgcagtccccac

SEQ ID NO: 1863 - RNA, 144 nt, synthetic construct
  misc_feature 1..144: note = Description of Artificial Sequence: Synthetic polynucleotide
  source 1..144: mol_type = other RNA
ggctgtggtggggactgcgggttttagagctagaaatagcaagttaaaataaggctagtccgttatcaacttgaaaaagtggcaccgagtcggtgcgccacgcccaaggggtgttcactgctggcctccgcagtccccaccaca

SEQ ID NO: 1864 - RNA, 144 nt, synthetic construct
  misc_feature 1..144: note = Description of Artificial Sequence: Synthetic polynucleotide
  source 1..144: mol_type = other RNA
ggctgtggtggggactgcgggttttagagctagaaatagcaagttaaaataaggctagtccgttatcaacttgaaaaagtggcaccgagtcggtgcgccacgcccaaggggtgttcactgctggcttccgcagtccccaccaca

SEQ ID NO: 1865 - RNA, 144 nt, synthetic construct
  misc_feature 1..144: note = Description of Artificial Sequence: Synthetic polynucleotide
  source 1..144: mol_type = other RNA
ggctgtggtggggactgcgggttttagagctagaaatagcaagttaaaataaggctagtccgttatcaacttgaaaaagtggcaccgagtcggtgctgactgccacgcccaaggggtgttcactgctggcttccgcagtcccca

SEQ ID NO: 1866 - RNA, 144 nt, synthetic construct
  misc_feature 1..144: note = Description of Artificial Sequence: Synthetic polynucleotide
  source 1..144: mol_type = other RNA
ggctgtggtggggactgcgggttttagagctagaaatagcaagttaaaataaggctagtccgttatcaacttgaaaaagtggcaccgagtcggtgctgactgccacgcccaaggggtgttcactgctggcctccgcagtcccca

SEQ ID NO: 1867 - RNA, 144 nt, synthetic construct
  misc_feature 1..144: note = Description of Artificial Sequence: Synthetic polynucleotide
  source 1..144: mol_type = other RNA
ggctgtggtggggactgcgggttttagagctagaaatagcaagttaaaataaggctagtccgttatcaacttgaaaaagtggcaccgagtcggtgcacgcccaaggggtgttcactgctggcttccgcagtccccacttttttt

SEQ ID NO: 1868 - RNA, 144 nt, synthetic construct
  misc_feature 1..144: note = Description of Artificial Sequence: Synthetic polynucleotide
  source 1..144: mol_type = other RNA
ggctgtggtggggactgcgggttttagagctagaaatagcaagttaaaataaggctagtccgttatcaacttgaaaaagtggcaccgagtcggtgcactgccacgcccaaggggtgttcactgctggcctccgcagtccccacc

SEQ ID NO: 1869 - RNA, 144 nt, synthetic construct
  misc_feature 1..144: note = Description of Artificial Sequence: Synthetic polynucleotide
  source 1..144: mol_type = other RNA
ggctgtggtggggactgcgggttttagagctagaaatagcaagttaaaataaggctagtccgttatcaacttgaaaaagtggcaccgagtcggtgcgccacgcccaaggggtgttcactgctggcctccgcagtcccttttttt

SEQ ID NO: 1870 - RNA, 144 nt, synthetic construct
  misc_feature 1..144: note = Description of Artificial Sequence: Synthetic polynucleotide
  source 1..144: mol_type = other RNA
ggctgtggtggggactgcgggttttagagctagaaatagcaagttaaaataaggctagtccgttatcaacttgaaaaagtggcaccgagtcggtgcgactgccacgcccaaggggtgttcactgctggcctccgcagtccccac

SEQ ID NO: 1871 - RNA, 144 nt, synthetic construct
  misc_feature 1..144: note = Description of Artificial Sequence: Synthetic polynucleotide
  source 1..144: mol_type = other RNA
ggctgtggtggggactgcgggttttagagctagaaatagcaagttaaaataaggctagtccgttatcaacttgaaaaagtggcaccgagtcggtgcgcccaaggggtgttcactgctggcctccgcagtccccaccattttttt

SEQ ID NO: 1872 - RNA, 144 nt, synthetic construct
  misc_feature 1..144: note = Description of Artificial Sequence: Synthetic polynucleotide
  source 1..144: mol_type = other RNA
ggctgtggtggggactgcgggttttagagctagaaatagcaagttaaaataaggctagtccgttatcaacttgaaaaagtggcaccgagtcggtgcgtgactgccacgcccaaggggtgttcactgctggcttccgcagtcccc

SEQ ID NO: 1873 - RNA, 144 nt, synthetic construct
  misc_feature 1..144: note = Description of Artificial Sequence: Synthetic polynucleotide
  source 1..144: mol_type = other RNA
ggctgtggtggggactgcgggttttagagctagaaatagcaagttaaaataaggctagtccgttatcaacttgaaaaagtggcaccgagtcggtgcacgcccaaggggtgttcactgctggcctccgcagtccccacttttttt

SEQ ID NO: 1874 - RNA, 144 nt, synthetic construct
  misc_feature 1..144: note = Description of Artificial Sequence: Synthetic polynucleotide
  source 1..144: mol_type = other RNA
ggctgtggtggggactgcgggttttagagctagaaatagcaagttaaaataaggctagtccgttatcaacttgaaaaagtggcaccgagtcggtgctgccacgcccaaggggtgttcactgctggcttccgcagtccccaccac

SEQ ID NO: 1875 - RNA, 144 nt, synthetic construct
  misc_feature 1..144: note = Description of Artificial Sequence: Synthetic polynucleotide
  source 1..144: mol_type = other RNA
ggctgtggtggggactgcgggttttagagctagaaatagcaagttaaaataaggctagtccgttatcaacttgaaaaagtggcaccgagtcggtgcgcccaaggggtgttcactgctggcttccgcagtccccaccattttttt

SEQ ID NO: 1876 - RNA, 144 nt, synthetic construct
  misc_feature 1..144: note = Description of Artificial Sequence: Synthetic polynucleotide
  source 1..144: mol_type = other RNA
ggctgtggtggggactgcgggttttagagctagaaatagcaagttaaaataaggctagtccgttatcaacttgaaaaagtggcaccgagtcggtgcactgccacgcccaaggggtgttcactgctggcttccgcagtccccacc

SEQ ID NO: 1877 - RNA, 144 nt, synthetic construct
  misc_feature 1..144: note = Description of Artificial Sequence: Synthetic polynucleotide
  source 1..144: mol_type = other RNA
ggctgtggtggggactgcgggttttagagctagaaatagcaagttaaaataaggctagtccgttatcaacttgaaaaagtggcaccgagtcggtgctgccacgcccaaggggtgttcactgctggcctccgcagtccccaccac

SEQ ID NO: 1878 - RNA, 144 nt, synthetic construct
  misc_feature 1..144: note = Description of Artificial Sequence: Synthetic polynucleotide
  source 1..144: mol_type = other RNA
ggctgtggtggggactgcgggttttagagctagaaatagcaagttaaaataaggctagtccgttatcaacttgaaaaagtggcaccgagtcggtgcgccacgcccaaggggtgttcactgctggcttccgcagtcccttttttt

SEQ ID NO: 1879 - RNA, 145 nt, synthetic construct
  misc_feature 1..145: note = Description of Artificial Sequence: Synthetic polynucleotide
  source 1..145: mol_type = other RNA
ggctgtggtggggactgcgggttttagagctagaaatagcaagttaaaataaggctagtccgttatcaacttgaaaaagtggcaccgagtcggtgctgccacgcccaaggggtgttcactgctggcttccgcagtcccttttttt

SEQ ID NO: 1880 - RNA, 145 nt, synthetic construct
  misc_feature 1..145: note = Description of Artificial Sequence: Synthetic polynucleotide
  source 1..145: mol_type = other RNA
ggctgtggtggggactgcgggttttagagctagaaatagcaagttaaaataaggctagtccgttatcaacttgaaaaagtggcaccgagtcggtgctgccacgcccaaggggtgttcactgctggcttccgcagtccccaccaca

SEQ ID NO: 1881 - RNA, 145 nt, synthetic construct
  misc_feature 1..145: note = Description of Artificial Sequence: Synthetic polynucleotide
  source 1..145: mol_type = other RNA
ggctgtggtggggactgcgggttttagagctagaaatagcaagttaaaataaggctagtccgttatcaacttgaaaaagtggcaccgagtcggtgcgccacgcccaaggggtgttcactgctggcttccgcagtccccttttttt

SEQ ID NO: 1882 - RNA, 145 nt, synthetic construct
  misc_feature 1..145: note = Description of Artificial Sequence: Synthetic polynucleotide
  source 1..145: mol_type = other RNA
ggctgtggtggggactgcgggttttagagctagaaatagcaagttaaaataaggctagtccgttatcaacttgaaaaagtggcaccgagtcggtgcactgccacgcccaaggggtgttcactgctggcctccgcagtccccacca

SEQ ID NO: 1883 - RNA, 145 nt, synthetic construct
  misc_feature 1..145: note = Description of Artificial Sequence: Synthetic polynucleotide
  source 1..145: mol_type = other RNA
ggctgtggtggggactgcgggttttagagctagaaatagcaagttaaaataaggctagtccgttatcaacttgaaaaagtggcaccgagtcggtgctgactgccacgcccaaggggtgttcactgctggcctccgcagtccccac

SEQ ID NO: 1884 - RNA, 145 nt, synthetic construct
  misc_feature 1..145: note = Description of Artificial Sequence: Synthetic polynucleotide
  source 1..145: mol_type = other RNA
ggctgtggtggggactgcgggttttagagctagaaatagcaagttaaaataaggctagtccgttatcaacttgaaaaagtggcaccgagtcggtgctgactgccacgcccaaggggtgttcactgctggcttccgcagtccccac

SEQ ID NO: 1885 - RNA, 145 nt, synthetic construct
  misc_feature 1..145: note = Description of Artificial Sequence: Synthetic polynucleotide
  source 1..145: mol_type = other RNA
ggctgtggtggggactgcgggttttagagctagaaatagcaagttaaaataaggctagtccgttatcaacttgaaaaagtggcaccgagtcggtgcacgcccaaggggtgttcactgctggcctccgcagtccccaccttttttt

SEQ ID NO: 1886 - RNA, 145 nt, synthetic construct
  misc_feature 1..145: note = Description of Artificial Sequence: Synthetic polynucleotide
  source 1..145: mol_type = other RNA
ggctgtggtggggactgcgggttttagagctagaaatagcaagttaaaataaggctagtccgttatcaacttgaaaaagtggcaccgagtcggtgcacgcccaaggggtgttcactgctggcttccgcagtccccaccttttttt

SEQ ID NO: 1887 - RNA, 145 nt, synthetic construct
  misc_feature 1..145: note = Description of Artificial Sequence: Synthetic polynucleotide
  source 1..145: mol_type = other RNA
ggctgtggtggggactgcgggttttagagctagaaatagcaagttaaaataaggctagtccgttatcaacttgaaaaagtggcaccgagtcggtgcgcccaaggggtgttcactgctggcctccgcagtccccaccacttttttt

SEQ ID NO: 1888 - RNA, 145 nt, synthetic construct
  misc_feature 1..145: note = Description of Artificial Sequence: Synthetic polynucleotide
  source 1..145: mol_type = other RNA
ggctgtggtggggactgcgggttttagagctagaaatagcaagttaaaataaggctagtccgttatcaacttgaaaaagtggcaccgagtcggtgcgactgccacgcccaaggggtgttcactgctggcttccgcagtccccacc

SEQ ID NO: 1889 - RNA, 145 nt, synthetic construct
  misc_feature 1..145: note = Description of Artificial Sequence: Synthetic polynucleotide
  source 1..145: mol_type = other RNA
ggctgtggtggggactgcgggttttagagctagaaatagcaagttaaaataaggctagtccgttatcaacttgaaaaagtggcaccgagtcggtgcgccacgcccaaggggtgttcactgctggcctccgcagtccccttttttt

SEQ ID NO: 1890 - RNA, 145 nt, synthetic construct
  misc_feature 1..145: note = Description of Artificial Sequence: Synthetic polynucleotide
  source 1..145: mol_type = other RNA
ggctgtggtggggactgcgggttttagagctagaaatagcaagttaaaataaggctagtccgttatcaacttgaaaaagtggcaccgagtcggtgcactgccacgcccaaggggtgttcactgctggcttccgcagtccccacca

SEQ ID NO: 1891 - RNA, 145 nt, synthetic construct
  misc_feature 1..145: note = Description of Artificial Sequence: Synthetic polynucleotide
  source 1..145: mol_type = other RNA
ggctgtggtggggactgcgggttttagagctagaaatagcaagttaaaataaggctagtccgttatcaacttgaaaaagtggcaccgagtcggtgctgccacgcccaaggggtgttcactgctggcctccgcagtcccttttttt

SEQ ID NO: 1892 - RNA, 145 nt, synthetic construct
  misc_feature 1..145: note = Description of Artificial Sequence: Synthetic polynucleotide
  source 1..145: mol_type = other RNA
ggctgtggtggggactgcgggttttagagctagaaatagcaagttaaaataaggctagtccgttatcaacttgaaaaagtggcaccgagtcggtgcgactgccacgcccaaggggtgttcactgctggcctccgcagtccccacc

SEQ ID NO: 1893 - RNA, 145 nt, synthetic construct
  misc_feature 1..145: note = Description of Artificial Sequence: Synthetic polynucleotide
  source 1..145: mol_type = other RNA
ggctgtggtggggactgcgggttttagagctagaaatagcaagttaaaataaggctagtccgttatcaacttgaaaaagtggcaccgagtcggtgcgtgactgccacgcccaaggggtgttcactgctggcttccgcagtcccca

SEQ ID NO: 1894 - RNA, 145 nt, synthetic construct
  misc_feature 1..145: note = Description of Artificial Sequence: Synthetic polynucleotide
  source 1..145: mol_type = other RNA
ggctgtggtggggactgcgggttttagagctagaaatagcaagttaaaataaggctagtccgttatcaacttgaaaaagtggcaccgagtcggtgcgcccaaggggtgttcactgctggcttccgcagtccccaccacttttttt

SEQ ID NO: 1895 - RNA, 145 nt, synthetic construct
  misc_feature 1..145: note = Description of Artificial Sequence: Synthetic polynucleotide
  source 1..145: mol_type = other RNA
ggctgtggtggggactgcgggttttagagctagaaatagcaagttaaaataaggctagtccgttatcaacttgaaaaagtggcaccgagtcggtgctgccacgcccaaggggtgttcactgctggcctccgcagtccccaccaca

SEQ ID NO: 1896 - RNA, 145 nt, synthetic construct
  misc_feature 1..145: note = Description of Artificial Sequence: Synthetic polynucleotide
  source 1..145: mol_type = other RNA
ggctgtggtggggactgcgggttttagagctagaaatagcaagttaaaataaggctagtccgttatcaacttgaaaaagtggcaccgagtcggtgcgtgactgccacgcccaaggggtgttcactgctggcctccgcagtcccca

SEQ ID NO: 1897 - RNA, 146 nt, synthetic construct
  misc_feature 1..146: note = Description of Artificial Sequence: Synthetic polynucleotide
  source 1..146: mol_type = other RNA
ggctgtggtggggactgcgggttttagagctagaaatagcaagttaaaataaggctagtccgttatcaacttgaaaaagtggcaccgagtcggtgctgccacgcccaaggggtgttcactgctggcctccgcagtccccttttttt

SEQ ID NO: 1898 - RNA, 146 nt, synthetic construct
  misc_feature 1..146: note = Description of Artificial Sequence: Synthetic polynucleotide
  source 1..146: mol_type = other RNA
ggctgtggtggggactgcgggttttagagctagaaatagcaagttaaaataaggctagtccgttatcaacttgaaaaagtggcaccgagtcggtgcacgcccaaggggtgttcactgctggcctccgcagtccccaccattttttt

SEQ ID NO: 1899 - RNA, 146 nt, synthetic construct
  misc_feature 1..146: note = Description of Artificial Sequence: Synthetic polynucleotide
  source 1..146: mol_type = other RNA
ggctgtggtggggactgcgggttttagagctagaaatagcaagttaaaataaggctagtccgttatcaacttgaaaaagtggcaccgagtcggtgcgccacgcccaaggggtgttcactgctggcttccgcagtccccattttttt

SEQ ID NO: 1900 - RNA, 146 nt, synthetic construct
  misc_feature 1..146: note = Description of Artificial Sequence: Synthetic polynucleotide
  source 1..146: mol_type = other RNA
ggctgtggtggggactgcgggttttagagctagaaatagcaagttaaaataaggctagtccgttatcaacttgaaaaagtggcaccgagtcggtgcgcccaaggggtgttcactgctggcctccgcagtccccaccacattttttt

SEQ ID NO: 1901 - RNA, 146 nt, synthetic construct
  misc_feature 1..146: note = Description of Artificial Sequence: Synthetic polynucleotide
  source 1..146: mol_type = other RNA
ggctgtggtggggactgcgggttttagagctagaaatagcaagttaaaataaggctagtccgttatcaacttgaaaaagtggcaccgagtcggtgcgcccaaggggtgttcactgctggcttccgcagtccccaccacattttttt

SEQ ID NO: 1902 - RNA, 146 nt, synthetic construct
  misc_feature 1..146: note = Description of Artificial Sequence: Synthetic polynucleotide
  source 1..146: mol_type = other RNA
ggctgtggtggggactgcgggttttagagctagaaatagcaagttaaaataaggctagtccgttatcaacttgaaaaagtggcaccgagtcggtgcgactgccacgcccaaggggtgttcactgctggcttccgcagtccccacca

SEQ ID NO: 1903 - RNA, 146 nt, synthetic construct
  misc_feature 1..146: note = Description of Artificial Sequence: Synthetic polynucleotide
  source 1..146: mol_type = other RNA
ggctgtggtggggactgcgggttttagagctagaaatagcaagttaaaataaggctagtccgttatcaacttgaaaaagtggcaccgagtcggtgcacgcccaaggggtgttcactgctggcttccgcagtccccaccattttttt

SEQ ID NO: 1904 - RNA, 146 nt, synthetic construct
  misc_feature 1..146: note = Description of Artificial Sequence: Synthetic polynucleotide
  source 1..146: mol_type = other RNA
ggctgtggtggggactgcgggttttagagctagaaatagcaagttaaaataaggctagtccgttatcaacttgaaaaagtggcaccgagtcggtgctgccacgcccaaggggtgttcactgctggcttccgcagtccccttttttt

SEQ ID NO: 1905 - RNA, 146 nt, synthetic construct
  misc_feature 1..146: note = Description of Artificial Sequence: Synthetic polynucleotide
  source 1..146: mol_type = other RNA
ggctgtggtggggactgcgggttttagagctagaaatagcaagttaaaataaggctagtccgttatcaacttgaaaaagtggcaccgagtcggtgcactgccacgcccaaggggtgttcactgctggcctccgcagtccccaccac

SEQ ID NO: 1906 - RNA, 146 nt, synthetic construct
  misc_feature 1..146: note = Description of Artificial Sequence: Synthetic polynucleotide
  source 1..146: mol_type = other RNA
ggctgtggtggggactgcgggttttagagctagaaatagcaagttaaaataaggctagtccgttatcaacttgaaaaagtggcaccgagtcggtgcgccacgcccaaggggtgttcactgctggcctccgcagtccccattttttt

SEQ ID NO: 1907 - RNA, 146 nt, synthetic construct
  misc_feature 1..146: note = Description of Artificial Sequence: Synthetic polynucleotide
  source 1..146: mol_type = other RNA
ggctgtggtggggactgcgggttttagagctagaaatagcaagttaaaataaggctagtccgttatcaacttgaaaaagtggcaccgagtcggtgcgtgactgccacgcccaaggggtgttcactgctggcctccgcagtccccac

SEQ ID NO: 1908 - RNA, 146 nt, synthetic construct
  misc_feature 1..146: note = Description of Artificial Sequence: Synthetic polynucleotide
  source 1..146: mol_type = other RNA
ggctgtggtggggactgcgggttttagagctagaaatagcaagttaaaataaggctagtccgttatcaacttgaaaaagtggcaccgagtcggtgctgactgccacgcccaaggggtgttcactgctggcctccgcagtccccacc

SEQ ID NO: 1909 - RNA, 146 nt, synthetic construct
  misc_feature 1..146: note = Description of Artificial Sequence: Synthetic polynucleotide
  source 1..146: mol_type = other RNA
ggctgtggtggggactgcgggttttagagctagaaatagcaagttaaaataaggctagtccgttatcaacttgaaaaagtggcaccgagtcggtgctgactgccacgcccaaggggtgttcactgctggcttccgcagtccccacc

SEQ ID NO: 1910 - RNA, 146 nt, synthetic construct
  misc_feature 1..146: note = Description of Artificial Sequence: Synthetic polynucleotide
  source 1..146: mol_type = other RNA
ggctgtggtggggactgcgggttttagagctagaaatagcaagttaaaataaggctagtccgttatcaacttgaaaaagtggcaccgagtcggtgcgtgactgccacgcccaaggggtgttcactgctggcttccgcagtccccac

SEQ ID NO: 1911 - RNA, 146 nt, synthetic construct
  misc_feature 1..146: note = Description of Artificial Sequence: Synthetic polynucleotide
  source 1..146: mol_type = other RNA
ggctgtggtggggactgcgggttttagagctagaaatagcaagttaaaataaggctagtccgttatcaacttgaaaaagtggcaccgagtcggtgcactgccacgcccaaggggtgttcactgctggcttccgcagtccccaccac

SEQ ID NO: 1912 - RNA, 146 nt, synthetic construct
  misc_feature 1..146: note = Description of Artificial Sequence: Synthetic polynucleotide
  source 1..146: mol_type = other RNA
ggctgtggtggggactgcgggttttagagctagaaatagcaagttaaaataaggctagtccgttatcaacttgaaaaagtggcaccgagtcggtgcgactgccacgcccaaggggtgttcactgctggcctccgcagtccccacca

SEQ ID NO: 1913 - RNA, 147 nt, synthetic construct
  misc_feature 1..147: note = Description of Artificial Sequence: Synthetic polynucleotide
  source 1..147: mol_type = other RNA
ggctgtggtggggactgcgggttttagagctagaaatagcaagttaaaataaggctagtccgttatcaacttgaaaaagtggcaccgagtcggtgcacgcccaaggggtgttcactgctggcttccgcagtccccaccacttttttt

SEQ ID NO: 1914 - RNA, 147 nt, synthetic construct
  misc_feature 1..147: note = Description of Artificial Sequence: Synthetic polynucleotide
  source 1..147: mol_type = other RNA
ggctgtggtggggactgcgggttttagagctagaaatagcaagttaaaataaggctagtccgttatcaacttgaaaaagtggcaccgagtcggtgcactgccacgcccaaggggtgttcactgctggcttccgcagtcccttttttt

SEQ ID NO: 1915 - RNA, 147 nt, synthetic construct
  misc_feature 1..147: note = Description of Artificial Sequence: Synthetic polynucleotide
  source 1..147: mol_type = other RNA
ggctgtggtggggactgcgggttttagagctagaaatagcaagttaaaataaggctagtccgttatcaacttgaaaaagtggcaccgagtcggtgcgtgactgccacgcccaaggggtgttcactgctggcctccgcagtccccacc

SEQ ID NO: 1916 - RNA, 147 nt, synthetic construct
  misc_feature 1..147: note = Description of Artificial Sequence: Synthetic polynucleotide
  source 1..147: mol_type = other RNA
ggctgtggtggggactgcgggttttagagctagaaatagcaagttaaaataaggctagtccgttatcaacttgaaaaagtggcaccgagtcggtgctgccacgcccaaggggtgttcactgctggcttccgcagtccccattttttt

SEQ ID NO: 1917 - RNA, 147 nt, synthetic construct
  misc_feature 1..147: note = Description of Artificial Sequence: Synthetic polynucleotide
  source 1..147: mol_type = other RNA
ggctgtggtggggactgcgggttttagagctagaaatagcaagttaaaataaggctagtccgttatcaacttgaaaaagtggcaccgagtcggtgcgccacgcccaaggggtgttcactgctggcttccgcagtccccacttttttt

SEQ ID NO: 1918 - RNA, 147 nt, synthetic construct
  misc_feature 1..147: note = Description of Artificial Sequence: Synthetic polynucleotide
  source 1..147: mol_type = other RNA
ggctgtggtggggactgcgggttttagagctagaaatagcaagttaaaataaggctagtccgttatcaacttgaaaaagtggcaccgagtcggtgcgtgactgccacgcccaaggggtgttcactgctggcttccgcagtccccacc

SEQ ID NO: 1919 - RNA, 147 nt, synthetic construct
  misc_feature 1..147: note = Description of Artificial Sequence: Synthetic polynucleotide
  source 1..147: mol_type = other RNA
ggctgtggtggggactgcgggttttagagctagaaatagcaagttaaaataaggctagtccgttatcaacttgaaaaagtggcaccgagtcggtgcactgccacgcccaaggggtgttcactgctggcttccgcagtccccaccaca

SEQ ID NO: 1920 - RNA, 147 nt, synthetic construct
  misc_feature 1..147: note = Description of Artificial Sequence: Synthetic polynucleotide
  source 1..147: mol_type = other RNA
ggctgtggtggggactgcgggttttagagctagaaatagcaagttaaaataaggctagtccgttatcaacttgaaaaagtggcaccgagtcggtgcactgccacgcccaaggggtgttcactgctggcctccgcagtccccaccaca

SEQ ID NO: 1921 - RNA, 147 nt, synthetic construct
  misc_feature 1..147: note = Description of Artificial Sequence: Synthetic polynucleotide
  source 1..147: mol_type = other RNA
ggctgtggtggggactgcgggttttagagctagaaatagcaagttaaaataaggctagtccgttatcaacttgaaaaagtggcaccgagtcggtgcgactgccacgcccaaggggtgttcactgctggcctccgcagtccccaccac

SEQ ID NO: 1922 - RNA, 147 nt, synthetic construct
  misc_feature 1..147: note = Description of Artificial Sequence: Synthetic polynucleotide
  source 1..147: mol_type = other RNA
ggctgtggtggggactgcgggttttagagctagaaatagcaagttaaaataaggctagtccgttatcaacttgaaaaagtggcaccgagtcggtgcactgccacgcccaaggggtgttcactgctggcctccgcagtcccttttttt

SEQ ID NO: 1923 - RNA, 147 nt, synthetic construct
  misc_feature 1..147: note = Description of Artificial Sequence: Synthetic polynucleotide
  source 1..147: mol_type = other RNA
ggctgtggtggggactgcgggttttagagctagaaatagcaagttaaaataaggctagtccgttatcaacttgaaaaagtggcaccgagtcggtgctgactgccacgcccaaggggtgttcactgctggcctccgcagtccccacca

SEQ ID NO: 1924 - RNA, 147 nt, synthetic construct
  misc_feature 1..147: note = Description of Artificial Sequence: Synthetic polynucleotide
  source 1..147: mol_type = other RNA
ggctgtggtggggactgcgggttttagagctagaaatagcaagttaaaataaggctagtccgttatcaacttgaaaaagtggcaccgagtcggtgcgactgccacgcccaaggggtgttcactgctggcttccgcagtccccaccac

SEQ ID NO: 1925 - RNA, 147 nt, synthetic construct
  misc_feature 1..147: note = Description of Artificial Sequence: Synthetic polynucleotide
  source 1..147: mol_type = other RNA
ggctgtggtggggactgcgggttttagagctagaaatagcaagttaaaataaggctagtccgttatcaacttgaaaaagtggcaccgagtcggtgcacgcccaaggggtgttcactgctggcctccgcagtccccaccacttttttt

SEQ ID NO: 1926 - RNA, 147 nt, synthetic construct
  misc_feature 1..147: note = Description of Artificial Sequence: Synthetic polynucleotide
  source 1..147: mol_type = other RNA
ggctgtggtggggactgcgggttttagagctagaaatagcaagttaaaataaggctagtccgttatcaacttgaaaaagtggcaccgagtcggtgcgccacgcccaaggggtgttcactgctggcctccgcagtccccacttttttt

SEQ ID NO: 1927 - RNA, 147 nt, synthetic construct
  misc_feature 1..147: note = Description of Artificial Sequence: Synthetic polynucleotide
  source 1..147: mol_type = other RNA
ggctgtggtggggactgcgggttttagagctagaaatagcaagttaaaataaggctagtccgttatcaacttgaaaaagtggcaccgagtcggtgctgccacgcccaaggggtgttcactgctggcctccgcagtccccattttttt

SEQ ID NO: 1928 - RNA, 147 nt, synthetic construct
  misc_feature 1..147: note = Description of Artificial Sequence: Synthetic polynucleotide
  source 1..147: mol_type = other RNA
ggctgtggtggggactgcgggttttagagctagaaatagcaagttaaaataaggctagtccgttatcaacttgaaaaagtggcaccgagtcggtgctgactgccacgcccaaggggtgttcactgctggcttccgcagtccccacca

SEQ ID NO: 1929 - RNA, 148 nt, synthetic construct
  misc_feature 1..148: note = Description of Artificial Sequence: Synthetic polynucleotide
  source 1..148: mol_type = other RNA
ggctgtggtggggactgcgggttttagagctagaaatagcaagttaaaataaggctagtccgttatcaacttgaaaaagtggcaccgagtcggtgcgccacgcccaaggggtgttcactgctggcctccgcagtccccaccttttttt

SEQ ID NO: 1930 - RNA, 148 nt, synthetic construct
  misc_feature 1..148: note = Description of Artificial Sequence: Synthetic polynucleotide
  source 1..148: mol_type = other RNA
ggctgtggtggggactgcgggttttagagctagaaatagcaagttaaaataaggctagtccgttatcaacttgaaaaagtggcaccgagtcggtgctgactgccacgcccaaggggtgttcactgctggcctccgcagtccccaccac

SEQ ID NO: 1931 - RNA, 148 nt, synthetic construct
  misc_feature 1..148: note = Description of Artificial Sequence: Synthetic polynucleotide
  source 1..148: mol_type = other RNA
ggctgtggtggggactgcgggttttagagctagaaatagcaagttaaaataaggctagtccgttatcaacttgaaaaagtggcaccgagtcggtgcactgccacgcccaaggggtgttcactgctggcctccgcagtccccttttttt

SEQ ID NO: 1932 - RNA, 148 nt, synthetic construct
  misc_feature 1..148: note = Description of Artificial Sequence: Synthetic polynucleotide
  source 1..148: mol_type = other RNA
ggctgtggtggggactgcgggttttagagctagaaatagcaagttaaaataaggctagtccgttatcaacttgaaaaagtggcaccgagtcggtgcacgcccaaggggtgttcactgctggcttccgcagtccccaccacattttttt

SEQ ID NO: 1933 - RNA, 148 nt, synthetic construct
  misc_feature 1..148: note = Description of Artificial Sequence: Synthetic polynucleotide
  source 1..148: mol_type = other RNA
ggctgtggtggggactgcgggttttagagctagaaatagcaagttaaaataaggctagtccgttatcaacttgaaaaagtggcaccgagtcggtgcgactgccacgcccaaggggtgttcactgctggcttccgcagtccccaccaca

SEQ ID NO: 1934 - RNA, 148 nt, synthetic construct
  misc_feature 1..148: note = Description of Artificial Sequence: Synthetic polynucleotide
  source 1..148: mol_type = other RNA
ggctgtggtggggactgcgggttttagagctagaaatagcaagttaaaataaggctagtccgttatcaacttgaaaaagtggcaccgagtcggtgcgccacgcccaaggggtgttcactgctggcttccgcagtccccaccttttttt

SEQ ID NO: 1935 - RNA, 148 nt, synthetic construct
  misc_feature 1..148: note = Description of Artificial Sequence: Synthetic polynucleotide
  source 1..148: mol_type = other RNA
ggctgtggtggggactgcgggttttagagctagaaatagcaagttaaaataaggctagtccgttatcaacttgaaaaagtggcaccgagtcggtgcgtgactgccacgcccaaggggtgttcactgctggcctccgcagtccccacca

SEQ ID NO: 1936 - RNA, 148 nt, synthetic construct
  misc_feature 1..148: note = Description of Artificial Sequence: Synthetic polynucleotide
  source 1..148: mol_type = other RNA
ggctgtggtggggactgcgggttttagagctagaaatagcaagttaaaataaggctagtccgttatcaacttgaaaaagtggcaccgagtcggtgcgactgccacgcccaaggggtgttcactgctggcttccgcagtcccttttttt

SEQ ID NO: 1937 - RNA, 148 nt, synthetic construct
  misc_feature 1..148: note = Description of Artificial Sequence: Synthetic polynucleotide
  source 1..148: mol_type = other RNA
ggctgtggtggggactgcgggttttagagctagaaatagcaagttaaaataaggctagtccgttatcaacttgaaaaagtggcaccgagtcggtgcgactgccacgcccaaggggtgttcactgctggcctccgcagtcccttttttt

SEQ ID NO: 1938 - RNA, 148 nt, synthetic construct
  misc_feature 1..148: note = Description of Artificial Sequence: Synthetic polynucleotide
  source 1..148: mol_type = other RNA
ggctgtggtggggactgcgggttttagagctagaaatagcaagttaaaataaggctagtccgttatcaacttgaaaaagtggcaccgagtcggtgcactgccacgcccaaggggtgttcactgctggcttccgcagtccccttttttt

SEQ ID NO: 1939 - RNA, 148 nt, synthetic construct
  misc_feature 1..148: note = Description of Artificial Sequence: Synthetic polynucleotide
  source 1..148: mol_type = other RNA
ggctgtggtggggactgcgggttttagagctagaaatagcaagttaaaataaggctagtccgttatcaacttgaaaaagtggcaccgagtcggtgctgccacgcccaaggggtgttcactgctggcctccgcagtccccacttttttt

SEQ ID NO: 1940 - RNA, 148 nt, synthetic construct
  misc_feature 1..148: note = Description of Artificial Sequence: Synthetic polynucleotide
  source 1..148: mol_type = other RNA
ggctgtggtggggactgcgggttttagagctagaaatagcaagttaaaataaggctagtccgttatcaacttgaaaaagtggcaccgagtcggtgctgactgccacgcccaaggggtgttcactgctggcttccgcagtccccaccac

SEQ ID NO: 1941 - RNA, 148 nt, synthetic construct
  misc_feature 1..148: note = Description of Artificial Sequence: Synthetic polynucleotide
  source 1..148: mol_type = other RNA
ggctgtggtggggactgcgggttttagagctagaaatagcaagttaaaataaggctagtccgttatcaacttgaaaaagtggcaccgagtcggtgcgactgccacgcccaaggggtgttcactgctggcctccgcagtccccaccaca

SEQ ID NO: 1942 - RNA, 148 nt, synthetic construct
  misc_feature 1..148: note = Description of Artificial Sequence: Synthetic polynucleotide
  source 1..148: mol_type = other RNA
ggctgtggtggggactgcgggttttagagctagaaatagcaagttaaaataaggctagtccgttatcaacttgaaaaagtggcaccgagtcggtgcacgcccaaggggtgttcactgctggcctccgcagtccccaccacattttttt

SEQ ID NO: 1943 - RNA, 148 nt, synthetic construct
  misc_feature 1..148: note = Description of Artificial Sequence: Synthetic polynucleotide
  source 1..148: mol_type = other RNA
ggctgtggtggggactgcgggttttagagctagaaatagcaagttaaaataaggctagtccgttatcaacttgaaaaagtggcaccgagtcggtgcgtgactgccacgcccaaggggtgttcactgctggcttccgcagtccccacca

SEQ ID NO: 1944 - RNA, 148 nt, synthetic construct
  misc_feature 1..148: note = Description of Artificial Sequence: Synthetic polynucleotide
  source 1..148: mol_type = other RNA
ggctgtggtggggactgcgggttttagagctagaaatagcaagttaaaataaggctagtccgttatcaacttgaaaaagtggcaccgagtcggtgctgccacgcccaaggggtgttcactgctggcttccgcagtccccacttttttt

SEQ ID NO: 1945 - RNA, 149 nt, synthetic construct
  misc_feature 1..149: note = Description of Artificial Sequence: Synthetic polynucleotide
  source 1..149: mol_type = other RNA
ggctgtggtggggactgcgggttttagagctagaaatagcaagttaaaataaggctagtccgttatcaacttgaaaaagtggcaccgagtcggtgctgactgccacgcccaaggggtgttcactgctggcctccgcagtccccaccaca

SEQ ID NO: 1946 - RNA, 149 nt, synthetic construct
  misc_feature 1..149: note = Description of Artificial Sequence: Synthetic polynucleotide
  source 1..149: mol_type = other RNA
ggctgtggtggggactgcgggttttagagctagaaatagcaagttaaaataaggctagtccgttatcaacttgaaaaagtggcaccgagtcggtgctgccacgcccaaggggtgttcactgctggcttccgcagtccccaccttttttt

SEQ ID NO: 1947 - RNA, 149 nt, synthetic construct
  misc_feature 1..149: note = Description of Artificial Sequence: Synthetic polynucleotide
  source 1..149: mol_type = other RNA
ggctgtggtggggactgcgggttttagagctagaaatagcaagttaaaataaggctagtccgttatcaacttgaaaaagtggcaccgagtcggtgctgactgccacgcccaaggggtgttcactgctggcctccgcagtcccttttttt

SEQ ID NO: 1948 - RNA, 149 nt, synthetic construct
  misc_feature 1..149: note = Description of Artificial Sequence: Synthetic polynucleotide
  source 1..149: mol_type = other RNA
ggctgtggtggggactgcgggttttagagctagaaatagcaagttaaaataaggctagtccgttatcaacttgaaaaagtggcaccgagtcggtgcactgccacgcccaaggggtgttcactgctggcctccgcagtccccattttttt

SEQ ID NO: 1949 - RNA, 149 nt, synthetic construct
  misc_feature 1..149: note = Description of Artificial Sequence: Synthetic polynucleotide
  source 1..149: mol_type = other RNA
ggctgtggtggggactgcgggttttagagctagaaatagcaagttaaaataaggctagtccgttatcaacttgaaaaagtggcaccgagtcggtgcgtgactgccacgcccaaggggtgttcactgctggcttccgcagtccccaccac

SEQ ID NO: 1950 - RNA, 149 nt, synthetic construct
  misc_feature 1..149: note = Description of Artificial Sequence: Synthetic polynucleotide
  source 1..149: mol_type = other RNA
ggctgtggtggggactgcgggttttagagctagaaatagcaagttaaaataaggctagtccgttatcaacttgaaaaagtggcaccgagtcggtgcactgccacgcccaaggggtgttcactgctggcttccgcagtccccattttttt

SEQ ID NO: 1951 - RNA, 149 nt, synthetic construct
  misc_feature 1..149: note = Description of Artificial Sequence: Synthetic polynucleotide
  source 1..149: mol_type = other RNA
ggctgtggtggggactgcgggttttagagctagaaatagcaagttaaaataaggctagtccgttatcaacttgaaaaagtggcaccgagtcggtgctgccacgcccaaggggtgttcactgctggcctccgcagtccccaccttttttt

SEQ ID NO: 1952 - RNA, 149 nt, synthetic construct
  misc_feature 1..149: note = Description of Artificial Sequence: Synthetic polynucleotide
  source 1..149: mol_type = other RNA
ggctgtggtggggactgcgggttttagagctagaaatagcaagttaaaataaggctagtccgttatcaacttgaaaaagtggcaccgagtcggtgcgccacgcccaaggggtgttcactgctggcctccgcagtccccaccattttttt

SEQ ID NO: 1953 - RNA, 149 nt, synthetic construct
  misc_feature 1..149: note = Description of Artificial Sequence: Synthetic polynucleotide
  source 1..149: mol_type = other RNA
ggctgtggtggggactgcgggttttagagctagaaatagcaagttaaaataaggctagtccgttatcaacttgaaaaagtggcaccgagtcggtgctgactgccacgcccaaggggtgttcactgctggcttccgcagtcccttttttt

SEQ ID NO: 1954 - RNA, 149 nt, synthetic construct
  misc_feature 1..149: note = Description of Artificial Sequence: Synthetic polynucleotide
  source 1..149: mol_type = other RNA
ggctgtggtggggactgcgggttttagagctagaaatagcaagttaaaataaggctagtccgttatcaacttgaaaaagtggcaccgagtcggtgcgtgactgccacgcccaaggggtgttcactgctggcctccgcagtccccaccac

SEQ ID NO: 1955 - RNA, 149 nt, synthetic construct
  misc_feature 1..149: note = Description of Artificial Sequence: Synthetic polynucleotide
  source 1..149: mol_type = other RNA
ggctgtggtggggactgcgggttttagagctagaaatagcaagttaaaataaggctagtccgttatcaacttgaaaaagtggcaccgagtcggtgcgactgccacgcccaaggggtgttcactgctggcttccgcagtccccttttttt

SEQ ID NO: 1956 - RNA, 149 nt, synthetic construct
  misc_feature 1..149: note = Description of Artificial Sequence: Synthetic polynucleotide
  source 1..149: mol_type = other RNA
ggctgtggtggggactgcgggttttagagctagaaatagcaagttaaaataaggctagtccgttatcaacttgaaaaagtggcaccgagtcggtgcgccacgcccaaggggtgttcactgctggcttccgcagtccccaccattttttt

SEQ ID NO: 1957 - RNA, 149 nt, synthetic construct
  misc_feature 1..149: note = Description of Artificial Sequence: Synthetic polynucleotide
  source 1..149: mol_type = other RNA
ggctgtggtggggactgcgggttttagagctagaaatagcaagttaaaataaggctagtccgttatcaacttgaaaaagtggcaccgagtcggtgcgactgccacgcccaaggggtgttcactgctggcctccgcagtccccttttttt

SEQ ID NO: 1958 - RNA, 149 nt, synthetic construct
  misc_feature 1..149: note = Description of Artificial Sequence: Synthetic polynucleotide
  source 1..149: mol_type = other RNA
ggctgtggtggggactgcgggttttagagctagaaatagcaagttaaaataaggctagtccgttatcaacttgaaaaagtggcaccgagtcggtgctgactgccacgcccaaggggtgttcactgctggcttccgcagtccccaccaca

SEQ ID NO: 1959 - RNA, 150 nt, synthetic construct
  misc_feature 1..150: note = Description of Artificial Sequence: Synthetic polynucleotide
  source 1..150: mol_type = other RNA
ggctgtggtggggactgcgggttttagagctagaaatagcaagttaaaataaggctagtccgttatcaacttgaaaaagtggcaccgagtcggtgcgactgccacgcccaaggggtgttcactgctggcttccgcagtccccattttttt

SEQ ID NO: 1960 - RNA, 150 nt, synthetic construct
  misc_feature 1..150: note = Description of Artificial Sequence: Synthetic polynucleotide
  source 1..150: mol_type = other RNA
ggctgtggtggggactgcgggttttagagctagaaatagcaagttaaaataaggctagtccgttatcaacttgaaaaagtggcaccgagtcggtgcgtgactgccacgcccaaggggtgttcactgctggcctccgcagtcccttttttt

SEQ ID NO: 1961 - RNA, 150 nt, synthetic construct
  misc_feature 1..150: note = Description of Artificial Sequence: Synthetic polynucleotide
  source 1..150: mol_type = other RNA
ggctgtggtggggactgcgggttttagagctagaaatagcaagttaaaataaggctagtccgttatcaacttgaaaaagtggcaccgagtcggtgctgccacgcccaaggggtgttcactgctggcctccgcagtccccaccattttttt

SEQ ID NO: 1962 - RNA, 150 nt, synthetic construct
  misc_feature 1..150: note = Description of Artificial Sequence: Synthetic polynucleotide
  source 1..150: mol_type = other RNA
ggctgtggtggggactgcgggttttagagctagaaatagcaagttaaaataaggctagtccgttatcaacttgaaaaagtggcaccgagtcggtgcgactgccacgcccaaggggtgttcactgctggcctccgcagtccccattttttt

SEQ ID NO: 1963 - RNA, 150 nt, synthetic construct
  misc_feature 1..150: note = Description of Artificial Sequence: Synthetic polynucleotide
  source 1..150: mol_type = other RNA
ggctgtggtggggactgcgggttttagagctagaaatagcaagttaaaataaggctagtccgttatcaacttgaaaaagtggcaccgagtcggtgcgccacgcccaaggggtgttcactgctggcctccgcagtccccaccacttttttt

SEQ ID NO: 1964 - RNA, 150 nt, synthetic construct
  misc_feature 1..150: note = Description of Artificial Sequence: Synthetic polynucleotide
  source 1..150: mol_type = other RNA
ggctgtggtggggactgcgggttttagagctagaaatagcaagttaaaataaggctagtccgttatcaacttgaaaaagtggcaccgagtcggtgctgactgccacgcccaaggggtgttcactgctggcctccgcagtccccttttttt

SEQ ID NO: 1965 - RNA, 150 nt, synthetic construct
  misc_feature 1..150: note = Description of Artificial Sequence: Synthetic polynucleotide
  source 1..150: mol_type = other RNA
ggctgtggtggggactgcgggttttagagctagaaatagcaagttaaaataaggctagtccgttatcaacttgaaaaagtggcaccgagtcggtgcactgccacgcccaaggggtgttcactgctggcttccgcagtccccacttttttt

SEQ ID NO: 1966 - RNA, 150 nt, synthetic construct
  misc_feature 1..150: note = Description of Artificial Sequence: Synthetic polynucleotide
  source 1..150: mol_type = other RNA
ggctgtggtggggactgcgggttttagagctagaaatagcaagttaaaataaggctagtccgttatcaacttgaaaaagtggcaccgagtcggtgcgtgactgccacgcccaaggggtgttcactgctggcctccgcagtccccaccaca

SEQ ID NO: 1967 - RNA, 150 nt, synthetic construct
  misc_feature 1..150: note = Description of Artificial Sequence: Synthetic polynucleotide
  source 1..150: mol_type = other RNA
ggctgtggtggggactgcgggttttagagctagaaatagcaagttaaaataaggctagtccgttatcaacttgaaaaagtggcaccgagtcggtgcgtgactgccacgcccaaggggtgttcactgctggcttccgcagtccccaccaca

SEQ ID NO: 1968 - RNA, 150 nt, synthetic construct
  misc_feature 1..150: note = Description of Artificial Sequence: Synthetic polynucleotide
  source 1..150: mol_type = other RNA
ggctgtggtggggactgcgggttttagagctagaaatagcaagttaaaataaggctagtccgttatcaacttgaaaaagtggcaccgagtcggtgctgactgccacgcccaaggggtgttcactgctggcttccgcagtccccttttttt

SEQ ID NO: 1969 - RNA, 150 nt, synthetic construct
  misc_feature 1..150: note = Description of Artificial Sequence: Synthetic polynucleotide
  source 1..150: mol_type = other RNA
ggctgtggtggggactgcgggttttagagctagaaatagcaagttaaaataaggctagtccgttatcaacttgaaaaagtggcaccgagtcggtgcgccacgcccaaggggtgttcactgctggcttccgcagtccccaccacttttttt

SEQ ID NO: 1970 - RNA, 150 nt, synthetic construct
  misc_feature 1..150: note = Description of Artificial Sequence: Synthetic polynucleotide
  source 1..150: mol_type = other RNA
ggctgtggtggggactgcgggttttagagctagaaatagcaagttaaaataaggctagtccgttatcaacttgaaaaagtggcaccgagtcggtgcactgccacgcccaaggggtgttcactgctggcctccgcagtccccacttttttt

SEQ ID NO: 1971 - RNA, 150 nt, synthetic construct
  misc_feature 1..150: note = Description of Artificial Sequence: Synthetic polynucleotide
  source 1..150: mol_type = other RNA
ggctgtggtggggactgcgggttttagagctagaaatagcaagttaaaataaggctagtccgttatcaacttgaaaaagtggcaccgagtcggtgctgccacgcccaaggggtgttcactgctggcttccgcagtccccaccattttttt

SEQ ID NO: 1972 - RNA, 150 nt, synthetic construct
  misc_feature 1..150: note = Description of Artificial Sequence: Synthetic polynucleotide
  source 1..150: mol_type = other RNA
ggctgtggtggggactgcgggttttagagctagaaatagcaagttaaaataaggctagtccgttatcaacttgaaaaagtggcaccgagtcggtgcgtgactgccacgcccaaggggtgttcactgctggcttccgcagtcccttttttt

SEQ ID NO: 1973 - RNA, 151 nt, synthetic construct
  misc_feature 1..151: note = Description of Artificial Sequence: Synthetic polynucleotide
  source 1..151: mol_type = other RNA
ggctgtggtggggactgcgggttttagagctagaaatagcaagttaaaataaggctagtccgttatcaacttgaaaaagtggcaccgagtcggtgcgactgccacgcccaaggggtgttcactgctggcctccgcagtccccacttttttt

SEQ ID NO: 1974 - RNA, 151 nt, synthetic construct
  misc_feature 1..151: note = Description of Artificial Sequence: Synthetic polynucleotide
  source 1..151: mol_type = other RNA
ggctgtggtggggactgcgggttttagagctagaaatagcaagttaaaataaggctagtccgttatcaacttgaaaaagtggcaccgagtcggtgctgccacgcccaaggggtgttcactgctggcttccgcagtccccaccacttttttt

SEQ ID NO: 1975 - RNA, 151 nt, synthetic construct
  misc_feature 1..151: note = Description of Artificial Sequence: Synthetic polynucleotide
  source 1..151: mol_type = other RNA
ggctgtggtggggactgcgggttttagagctagaaatagcaagttaaaataaggctagtccgttatcaacttgaaaaagtggcaccgagtcggtgcgtgactgccacgcccaaggggtgttcactgctggcctccgcagtccccttttttt

SEQ ID NO: 1976 - RNA, 151 nt, synthetic construct
  misc_feature 1..151: note = Description of Artificial Sequence: Synthetic polynucleotide
  source 1..151: mol_type = other RNA
ggctgtggtggggactgcgggttttagagctagaaatagcaagttaaaataaggctagtccgttatcaacttgaaaaagtggcaccgagtcggtgcactgccacgcccaaggggtgttcactgctggcctccgcagtccccaccttttttt

SEQ ID NO: 1977 - RNA, 151 nt, synthetic construct
  misc_feature 1..151: note = Description of Artificial Sequence: Synthetic polynucleotide
  source 1..151: mol_type = other RNA
ggctgtggtggggactgcgggttttagagctagaaatagcaagttaaaataaggctagtccgttatcaacttgaaaaagtggcaccgagtcggtgcactgccacgcccaaggggtgttcactgctggcttccgcagtccccaccttttttt

SEQ ID NO: 1978 - RNA, 151 nt, synthetic construct
  misc_feature 1..151: note = Description of Artificial Sequence: Synthetic polynucleotide
  source 1..151: mol_type = other RNA
ggctgtggtggggactgcgggttttagagctagaaatagcaagttaaaataaggctagtccgttatcaacttgaaaaagtggcaccgagtcggtgctgactgccacgcccaaggggtgttcactgctggcttccgcagtccccattttttt

SEQ ID NO: 1979 - RNA, 151 nt, synthetic construct
  misc_feature 1..151: note = Description of Artificial Sequence: Synthetic polynucleotide
  source 1..151: mol_type = other RNA
ggctgtggtggggactgcgggttttagagctagaaatagcaagttaaaataaggctagtccgttatcaacttgaaaaagtggcaccgagtcggtgcgactgccacgcccaaggggtgttcactgctggcttccgcagtccccacttttttt

SEQ ID NO: 1980 - RNA, 151 nt, synthetic construct
  misc_feature 1..151: note = Description of Artificial Sequence: Synthetic polynucleotide
  source 1..151: mol_type = other RNA
ggctgtggtggggactgcgggttttagagctagaaatagcaagttaaaataaggctagtccgttatcaacttgaaaaagtggcaccgagtcggtgctgactgccacgcccaaggggtgttcactgctggcctccgcagtccccattttttt

SEQ ID NO: 1981 - RNA, 151 nt, synthetic construct
  misc_feature 1..151: note = Description of Artificial Sequence: Synthetic polynucleotide
  source 1..151: mol_type = other RNA
ggctgtggtggggactgcgggttttagagctagaaatagcaagttaaaataaggctagtccgttatcaacttgaaaaagtggcaccgagtcggtgcgccacgcccaaggggtgttcactgctggcctccgcagtccccaccacattttttt

SEQ ID NO: 1982 - RNA, 151 nt, synthetic construct
  misc_feature 1..151: note = Description of Artificial Sequence: Synthetic polynucleotide
  source 1..151: mol_type = other RNA
ggctgtggtggggactgcgggttttagagctagaaatagcaagttaaaataaggctagtccgttatcaacttgaaaaagtggcaccgagtcggtgcgtgactgccacgcccaaggggtgttcactgctggcttccgcagtccccttttttt

SEQ ID NO: 1983 - RNA, 151 nt, synthetic construct
  misc_feature 1..151: note = Description of Artificial Sequence: Synthetic polynucleotide
  source 1..151: mol_type = other RNA
ggctgtggtggggactgcgggttttagagctagaaatagcaagttaaaataaggctagtccgttatcaacttgaaaaagtggcaccgagtcggtgctgccacgcccaaggggtgttcactgctggcctccgcagtccccaccacttttttt

SEQ ID NO: 1984 - RNA, 151 nt, synthetic construct
  misc_feature 1..151: note = Description of Artificial Sequence: Synthetic polynucleotide
  source 1..151: mol_type = other RNA
ggctgtggtggggactgcgggttttagagctagaaatagcaagttaaaataaggctagtccgttatcaacttgaaaaagtggcaccgagtcggtgcgccacgcccaaggggtgttcactgctggcttccgcagtccccaccacattttttt

SEQ ID NO: 1985 - RNA, 152 nt, synthetic construct
  misc_feature 1..152: note = Description of Artificial Sequence: Synthetic polynucleotide
  source 1..152: mol_type = other RNA
ggctgtggtggggactgcgggttttagagctagaaatagcaagttaaaataaggctagtccgttatcaacttgaaaaagtggcaccgagtcggtgctgccacgcccaaggggtgttcactgctggcttccgcagtccccaccacattttttt

SEQ ID NO: 1986 - RNA, 152 nt, synthetic construct
  misc_feature 1..152: note = Description of Artificial Sequence: Synthetic polynucleotide
  source 1..152: mol_type = other RNA
ggctgtggtggggactgcgggttttagagctagaaatagcaagttaaaataaggctagtccgttatcaacttgaaaaagtggcaccgagtcggtgcgactgccacgcccaaggggtgttcactgctggcctccgcagtccccaccttttttt

SEQ ID NO: 1987 - RNA, 152 nt, synthetic construct
  misc_feature 1..152: note = Description of Artificial Sequence: Synthetic polynucleotide
  source 1..152: mol_type = other RNA
ggctgtggtggggactgcgggttttagagctagaaatagcaagttaaaataaggctagtccgttatcaacttgaaaaagtggcaccgagtcggtgcactgccacgcccaaggggtgttcactgctggcttccgcagtccccaccattttttt

SEQ ID NO: 1988 - RNA, 152 nt, synthetic construct
  misc_feature 1..152: note = Description of Artificial Sequence: Synthetic polynucleotide
  source 1..152: mol_type = other RNA
ggctgtggtggggactgcgggttttagagctagaaatagcaagttaaaataaggctagtccgttatcaacttgaaaaagtggcaccgagtcggtgcactgccacgcccaaggggtgttcactgctggcctccgcagtccccaccattttttt

SEQ ID NO: 1989 - RNA, 152 nt, synthetic construct
  misc_feature 1..152: note = Description of Artificial Sequence: Synthetic polynucleotide
  source 1..152: mol_type = other RNA
ggctgtggtggggactgcgggttttagagctagaaatagcaagttaaaataaggctagtccgttatcaacttgaaaaagtggcaccgagtcggtgcgtgactgccacgcccaaggggtgttcactgctggcttccgcagtccccattttttt

SEQ ID NO: 1990 - RNA, 152 nt, synthetic construct
  misc_feature 1..152: note = Description of Artificial Sequence: Synthetic polynucleotide
  source 1..152: mol_type = other RNA
ggctgtggtggggactgcgggttttagagctagaaatagcaagttaaaataaggctagtccgttatcaacttgaaaaagtggcaccgagtcggtgctgactgccacgcccaaggggtgttcactgctggcttccgcagtccccacttttttt

SEQ ID NO: 1991 - RNA, 152 nt, synthetic construct
  misc_feature 1..152: note = Description of Artificial Sequence: Synthetic polynucleotide
  source 1..152: mol_type = other RNA
ggctgtggtggggactgcgggttttagagctagaaatagcaagttaaaataaggctagtccgttatcaacttgaaaaagtggcaccgagtcggtgcgtgactgccacgcccaaggggtgttcactgctggcctccgcagtccccattttttt

SEQ ID NO: 1992 - RNA, 152 nt, synthetic construct
  misc_feature 1..152: note = Description of Artificial Sequence: Synthetic polynucleotide
  source 1..152: mol_type = other RNA
ggctgtggtggggactgcgggttttagagctagaaatagcaagttaaaataaggctagtccgttatcaacttgaaaaagtggcaccgagtcggtgcgactgccacgcccaaggggtgttcactgctggcttccgcagtccccaccttttttt

SEQ ID NO: 1993 - RNA, 152 nt, synthetic construct
  misc_feature 1..152: note = Description of Artificial Sequence: Synthetic polynucleotide
  source 1..152: mol_type = other RNA
ggctgtggtggggactgcgggttttagagctagaaatagcaagttaaaataaggctagtccgttatcaacttgaaaaagtggcaccgagtcggtgctgactgccacgcccaaggggtgttcactgctggcctccgcagtccccacttttttt

SEQ ID NO: 1994 - RNA, 152 nt, synthetic construct
  misc_feature 1..152: note = Description of Artificial Sequence: Synthetic polynucleotide
  source 1..152: mol_type = other RNA
ggctgtggtggggactgcgggttttagagctagaaatagcaagttaaaataaggctagtccgttatcaacttgaaaaagtggcaccgagtcggtgctgccacgcccaaggggtgttcactgctggcctccgcagtccccaccacattttttt

SEQ ID NO: 1995 - RNA, 153 nt, synthetic construct
  misc_feature 1..153: note = Description of Artificial Sequence: Synthetic polynucleotide
  source 1..153: mol_type = other RNA
ggctgtggtggggactgcgggttttagagctagaaatagcaagttaaaataaggctagtccgttatcaacttgaaaaagtggcaccgagtcggtgcactgccacgcccaaggggtgttcactgctggcctccgcagtccccaccacttttttt

SEQ ID NO: 1996 - RNA, 153 nt, synthetic construct
  misc_feature 1..153: note = Description of Artificial Sequence: Synthetic polynucleotide
  source 1..153: mol_type = other RNA
ggctgtggtggggactgcgggttttagagctagaaatagcaagttaaaataaggctagtccgttatcaacttgaaaaagtggcaccgagtcggtgcactgccacgcccaaggggtgttcactgctggcttccgcagtccccaccacttttttt

SEQ ID NO: 1997 - RNA, 153 nt, synthetic construct
  misc_feature 1..153: note = Description of Artificial Sequence: Synthetic polynucleotide
  source 1..153: mol_type = other RNA
ggctgtggtggggactgcgggttttagagctagaaatagcaagttaaaataaggctagtccgttatcaacttgaaaaagtggcaccgagtcggtgctgactgccacgcccaaggggtgttcactgctggcctccgcagtccccaccttttttt

SEQ ID NO: 1998 - RNA, 153 nt, synthetic construct
  misc_feature 1..153: note = Description of Artificial Sequence: Synthetic polynucleotide
  source 1..153: mol_type = other RNA
ggctgtggtggggactgcgggttttagagctagaaatagcaagttaaaataaggctagtccgttatcaacttgaaaaagtggcaccgagtcggtgctgactgccacgcccaaggggtgttcactgctggcttccgcagtccccaccttttttt

SEQ ID NO: 1999 - RNA, 153 nt, synthetic construct
  misc_feature 1..153: note = Description of Artificial Sequence: Synthetic polynucleotide
  source 1..153: mol_type = other RNA
ggctgtggtggggactgcgggttttagagctagaaatagcaagttaaaataaggctagtccgttatcaacttgaaaaagtggcaccgagtcggtgcgtgactgccacgcccaaggggtgttcactgctggcctccgcagtccccacttttttt

SEQ ID NO: 2000 - RNA, 153 nt, synthetic construct
  misc_feature 1..153: note = Description of Artificial Sequence: Synthetic polynucleotide
  source 1..153: mol_type = other RNA
ggctgtggtggggactgcgggttttagagctagaaatagcaagttaaaataaggctagtccgttatcaacttgaaaaagtggcaccgagtcggtgcgtgactgccacgcccaaggggtgttcactgctggcttccgcagtccccacttttttt

SEQ ID NO: 2001 - RNA, 153 nt, synthetic construct
  misc_feature 1..153: note = Description of Artificial Sequence: Synthetic polynucleotide
  source 1..153: mol_type = other RNA
ggctgtggtggggactgcgggttttagagctagaaatagcaagttaaaataaggctagtccgttatcaacttgaaaaagtggcaccgagtcggtgcgactgccacgcccaaggggtgttcactgctggcttccgcagtccccaccattttttt

SEQ ID NO: 2002 - RNA, 153 nt, synthetic construct
  misc_feature 1..153: note = Description of Artificial Sequence: Synthetic polynucleotide
  source 1..153: mol_type = other RNA
ggctgtggtggggactgcgggttttagagctagaaatagcaagttaaaataaggctagtccgttatcaacttgaaaaagtggcaccgagtcggtgcgactgccacgcccaaggggtgttcactgctggcctccgcagtccccaccattttttt

SEQ ID NO: 2003 - RNA, 154 nt, synthetic construct
  misc_feature 1..154: note = Description of Artificial Sequence: Synthetic polynucleotide
  source 1..154: mol_type = other RNA
ggctgtggtggggactgcgggttttagagctagaaatagcaagttaaaataaggctagtccgttatcaacttgaaaaagtggcaccgagtcggtgcactgccacgcccaaggggtgttcactgctggcttccgcagtccccaccacattttttt

SEQ ID NO: 2004 - RNA, 154 nt, synthetic construct
  misc_feature 1..154: note = Description of Artificial Sequence: Synthetic polynucleotide
  source 1..154: mol_type = other RNA
ggctgtggtggggactgcgggttttagagctagaaatagcaagttaaaataaggctagtccgttatcaacttgaaaaagtggcaccgagtcggtgcgactgccacgcccaaggggtgttcactgctggcctccgcagtccccaccacttttttt

SEQ ID NO: 2005 - RNA, 154 nt, synthetic construct
  misc_feature 1..154: note = Description of Artificial Sequence: Synthetic polynucleotide
  source 1..154: mol_type = other RNA
ggctgtggtggggactgcgggttttagagctagaaatagcaagttaaaataaggctagtccgttatcaacttgaaaaagtggcaccgagtcggtgctgactgccacgcccaaggggtgttcactgctggcctccgcagtccccaccattttttt

SEQ ID NO: 2006 - RNA, 154 nt, synthetic construct
  misc_feature 1..154: note = Description of Artificial Sequence: Synthetic polynucleotide
  source 1..154: mol_type = other RNA
ggctgtggtggggactgcgggttttagagctagaaatagcaagttaaaataaggctagtccgttatcaacttgaaaaagtggcaccgagtcggtgcgactgccacgcccaaggggtgttcactgctggcttccgcagtccccaccacttttttt

SEQ ID NO: 2007 - RNA, 154 nt, synthetic construct
  misc_feature 1..154: note = Description of Artificial Sequence: Synthetic polynucleotide
  source 1..154: mol_type = other RNA
ggctgtggtggggactgcgggttttagagctagaaatagcaagttaaaataaggctagtccgttatcaacttgaaaaagtggcaccgagtcggtgcgtgactgccacgcccaaggggtgttcactgctggcttccgcagtccccaccttttttt

SEQ ID NO: 2008 - RNA, 154 nt, synthetic construct
  misc_feature 1..154: note = Description of Artificial Sequence: Synthetic polynucleotide
  source 1..154: mol_type = other RNA
ggctgtggtggggactgcgggttttagagctagaaatagcaagttaaaataaggctagtccgttatcaacttgaaaaagtggcaccgagtcggtgcactgccacgcccaaggggtgttcactgctggcctccgcagtccccaccacattttttt

SEQ ID NO: 2009 - RNA, 154 nt, synthetic construct
  misc_feature 1..154: note = Description of Artificial Sequence: Synthetic polynucleotide
  source 1..154: mol_type = other RNA
ggctgtggtggggactgcgggttttagagctagaaatagcaagttaaaataaggctagtccgttatcaacttgaaaaagtggcaccgagtcggtgcgtgactgccacgcccaaggggtgttcactgctggcctccgcagtccccaccttttttt

SEQ ID NO: 2010 - RNA, 154 nt, synthetic construct
  misc_feature 1..154: note = Description of Artificial Sequence: Synthetic polynucleotide
  source 1..154: mol_type = other RNA
ggctgtggtggggactgcgggttttagagctagaaatagcaagttaaaataaggctagtccgttatcaacttgaaaaagtggcaccgagtcggtgctgactgccacgcccaaggggtgttcactgctggcttccgcagtccccaccattttttt

SEQ ID NO: 2011 - RNA, 155 nt, synthetic construct
  misc_feature 1..155: note = Description of Artificial Sequence: Synthetic polynucleotide
  source 1..155: mol_type = other RNA
ggctgtggtggggactgcgggttttagagctagaaatagcaagttaaaataaggctagtccgttatcaacttgaaaaagtggcaccgagtcggtgcgactgccacgcccaaggggtgttcactgctggcctccgcagtccccaccacattttttt

SEQ ID NO: 2012 - RNA, 155 nt, synthetic construct
  misc_feature 1..155: note = Description of Artificial Sequence: Synthetic polynucleotide
  source 1..155: mol_type = other RNA
ggctgtggtggggactgcgggttttagagctagaaatagcaagttaaaataaggctagtccgttatcaacttgaaaaagtggcaccgagtcggtgcgtgactgccacgcccaaggggtgttcactgctggcctccgcagtccccaccattttttt

SEQ ID NO: 2013 - RNA, 155 nt, synthetic construct
  misc_feature 1..155: note = Description of Artificial Sequence: Synthetic polynucleotide
  source 1..155: mol_type = other RNA
ggctgtggtggggactgcgggttttagagctagaaatagcaagttaaaataaggctagtccgttatcaacttgaaaaagtggcaccgagtcggtgctgactgccacgcccaaggggtgttcactgctggcttccgcagtccccaccacttttttt

SEQ ID NO: 2014 - RNA, 155 nt, synthetic construct
  misc_feature 1..155: note = Description of Artificial Sequence: Synthetic polynucleotide
  source 1..155: mol_type = other RNA
ggctgtggtggggactgcgggttttagagctagaaatagcaagttaaaataaggctagtccgttatcaacttgaaaaagtggcaccgagtcggtgcgtgactgccacgcccaaggggtgttcactgctggcttccgcagtccccaccattttttt

SEQ ID NO: 2015 - RNA, 155 nt, synthetic construct
  misc_feature 1..155: note = Description of Artificial Sequence: Synthetic polynucleotide
  source 1..155: mol_type = other RNA
ggctgtggtggggactgcgggttttagagctagaaatagcaagttaaaataaggctagtccgttatcaacttgaaaaagtggcaccgagtcggtgctgactgccacgcccaaggggtgttcactgctggcctccgcagtccccaccacttttttt

SEQ ID NO: 2016 - RNA, 155 nt, synthetic construct
  misc_feature 1..155: note = Description of Artificial Sequence: Synthetic polynucleotide
  source 1..155: mol_type = other RNA
ggctgtggtggggactgcgggttttagagctagaaatagcaagttaaaataaggctagtccgttatcaacttgaaaaagtggcaccgagtcggtgcgactgccacgcccaaggggtgttcactgctggcttccgcagtccccaccacattttttt

SEQ ID NO: 2017 - RNA, 156 nt, synthetic construct
  misc_feature 1..156: note = Description of Artificial Sequence: Synthetic polynucleotide
  source 1..156: mol_type = other RNA
ggctgtggtggggactgcgggttttagagctagaaatagcaagttaaaataaggctagtccgttatcaacttgaaaaagtggcaccgagtcggtgctgactgccacgcccaaggggtgttcactgctggcctccgcagtccccaccacattttttt

SEQ ID NO: 2018 - RNA, 156 nt, synthetic construct
  misc_feature 1..156: note = Description of Artificial Sequence: Synthetic polynucleotide
  source 1..156: mol_type = other RNA
ggctgtggtggggactgcgggttttagagctagaaatagcaagttaaaataaggctagtccgttatcaacttgaaaaagtggcaccgagtcggtgcgtgactgccacgcccaaggggtgttcactgctggcctccgcagtccccaccacttttttt

SEQ ID NO: 2019 - RNA, 156 nt, synthetic construct
  misc_feature 1..156: note = Description of Artificial Sequence: Synthetic polynucleotide
  source 1..156: mol_type = other RNA
ggctgtggtggggactgcgggttttagagctagaaatagcaagttaaaataaggctagtccgttatcaacttgaaaaagtggcaccgagtcggtgcgtgactgccacgcccaaggggtgttcactgctggcttccgcagtccccaccacttttttt

SEQ ID NO: 2020 - RNA, 156 nt, synthetic construct
  misc_feature 1..156: note = Description of Artificial Sequence: Synthetic polynucleotide
  source 1..156: mol_type = other RNA
ggctgtggtggggactgcgggttttagagctagaaatagcaagttaaaataaggctagtccgttatcaacttgaaaaagtggcaccgagtcggtgctgactgccacgcccaaggggtgttcactgctggcttccgcagtccccaccacattttttt

SEQ ID NO: 2021 - RNA, 157 nt, synthetic construct
  misc_feature 1..157: note = Description of Artificial Sequence: Synthetic polynucleotide
  source 1..157: mol_type = other RNA
ggctgtggtggggactgcgggttttagagctagaaatagcaagttaaaataaggctagtccgttatcaacttgaaaaagtggcaccgagtcggtgcgtgactgccacgcccaaggggtgttcactgctggcttccgcagtccccaccacattttttt

SEQ ID NO: 2022 - RNA, 157 nt, synthetic construct
  misc_feature 1..157: note = Description of Artificial Sequence: Synthetic polynucleotide
  source 1..157: mol_type = other RNA
ggctgtggtggggactgcgggttttagagctagaaatagcaagttaaaataaggctagtccgttatcaacttgaaaaagtggcaccgagtcggtgcgtgactgccacgcccaaggggtgttcactgctggcctccgcagtccccaccacattttttt

SEQ ID NO: 2023 - RNA, 20 nt, synthetic construct
  misc_feature 1..20: note = Description of Artificial Sequence: Synthetic oligonucleotide
  source 1..20: mol_type = other RNA
acgtacctctttacagtatt

SEQ ID NO: 2024-2026 - skipped (3 entries)

SEQ ID NO: 2027 - RNA, 10 nt, synthetic construct
  misc_feature 1..10: note = Description of Artificial Sequence: Synthetic oligonucleotide
  source 1..10: mol_type = other RNA
actgtaaaga

SEQ ID NO: 2028 - RNA, 11 nt, synthetic construct
  misc_feature 1..11: note = Description of Artificial Sequence: Synthetic oligonucleotide
  source 1..11: mol_type = other RNA
actgtaaagag

SEQ ID NO: 2029 - RNA, 12 nt, synthetic construct
  misc_feature 1..12: note = Description of Artificial Sequence: Synthetic oligonucleotide
  source 1..12: mol_type = other RNA
actgtaaagagg

SEQ ID NO: 2030 - RNA, 13 nt, synthetic construct
  misc_feature 1..13: note = Description of Artificial Sequence: Synthetic oligonucleotide
  source 1..13: mol_type = other RNA
actgtaaagaggt

SEQ ID NO: 2031 - RNA, 14 nt, synthetic construct
  misc_feature 1..14: note = Description of Artificial Sequence: Synthetic oligonucleotide
  source 1..14: mol_type = other RNA
actgtaaagaggta

SEQ ID NO: 2032 - RNA, 15 nt, synthetic construct
  misc_feature 1..15: note = Description of Artificial Sequence: Synthetic oligonucleotide
  source 1..15: mol_type = other RNA
actgtaaagaggtac

SEQ ID NO: 2033 - RNA, 16 nt, synthetic construct
  misc_feature 1..16: note = Description of Artificial Sequence: Synthetic oligonucleotide
  source 1..16: mol_type = other RNA
actgtaaagaggtacg

SEQ ID NO: 2034 - RNA, 17 nt, synthetic construct
  misc_feature 1..17: note = Description of Artificial Sequence: Synthetic oligonucleotide
  source 1..17: mol_type = other RNA
actgtaaagaggtacgt

SEQ ID NO: 2035 - RNA, 27 nt, synthetic construct
  misc_feature 1..27: note = Description of Artificial Sequence: Synthetic oligonucleotide
  source 1..27: mol_type = other RNA
accccttgggcgtggcagtcaccaaat

SEQ ID NO: 2036 - RNA, 29 nt, synthetic construct
  misc_feature 1..29: note = Description of Artificial Sequence: Synthetic oligonucleotide
  source 1..29: mol_type = other RNA
acaccccttgggcgtggcagtcaccaaat

SEQ ID NO: 2037 - RNA, 30 nt, synthetic construct
  misc_feature 1..30: note = Description of Artificial Sequence: Synthetic oligonucleotide
  source 1..30: mol_type = other RNA
aacaccccttgggcgtggcagtcaccaaat

SEQ ID NO: 2038 - RNA, 31 nt, synthetic construct
  misc_feature 1..31: note = Description of Artificial Sequence: Synthetic oligonucleotide
  source 1..31: mol_type = other RNA
gaacaccccttgggcgtggcagtcaccaaat

SEQ ID NO: 2039 - RNA, 32 nt, synthetic construct
  misc_feature 1..32: note = Description of Artificial Sequence: Synthetic oligonucleotide
  source 1..32: mol_type = other RNA
tgaacaccccttgggcgtggcagtcaccaaat

SEQ ID NO: 2040 - RNA, 33 nt, synthetic construct
  misc_feature 1..33: note = Description of Artificial Sequence: Synthetic oligonucleotide
  source 1..33: mol_type = other RNA
gtgaacaccccttgggcgtggcagtcaccaaat

SEQ ID NO: 2041 - RNA, 34 nt, synthetic construct
  misc_feature 1..34: note = Description of Artificial Sequence: Synthetic oligonucleotide
  source 1..34: mol_type = other RNA
agtgaacaccccttgggcgtggcagtcaccaaat

SEQ ID NO: 2042 - RNA, 36 nt, synthetic construct
  misc_feature 1..36: note = Description of Artificial Sequence: Synthetic oligonucleotide
  source 1..36: mol_type = other RNA
gcagtgaacaccccttgggcgtggcagtcaccaaat

SEQ ID NO: 2043 - RNA, 37 nt, synthetic construct
  misc_feature 1..37: note = Description of Artificial Sequence: Synthetic oligonucleotide
  source 1..37: mol_type = other RNA
agcagtgaacaccccttgggcgtggcagtcaccaaat

SEQ ID NO: 2044 - RNA, 40 nt, synthetic construct
  misc_feature 1..40: note = Description of Artificial Sequence: Synthetic oligonucleotide
  source 1..40: mol_type = other RNA
gccagcagtgaacaccccttgggcgtggcagtcaccaaat

SEQ ID NO: 2045 - RNA, 20 nt, synthetic construct
  misc_feature 1..20: note = Description of Artificial Sequence: Synthetic oligonucleotide
  source 1..20: mol_type = other RNA
agtcaccaaatactgtaaag

SEQ ID NO: 2046 - RNA, 20 nt, synthetic construct
  misc_feature 1..20: note = Description of Artificial Sequence: Synthetic oligonucleotide
  source 1..20: mol_type = other RNA
atgcgggtgctcctgctggg

SEQ ID NO: 2047 - RNA, 20 nt, synthetic construct
  misc_feature 1..20: note = Description of Artificial Sequence: Synthetic oligonucleotide
  source 1..20: mol_type = other RNA
gtgctcctgctgggggatgt

SEQ ID NO: 2048 - RNA, 20 nt, synthetic construct
  misc_feature 1..20: note = Description of Artificial Sequence: Synthetic oligonucleotide
  source 1..20: mol_type = other RNA
tgtaaagaggtacgtggact

SEQ ID NO: 2049 - RNA, 20 nt, synthetic construct
  misc_feature 1..20: note = Description of Artificial Sequence: Synthetic oligonucleotide
  source 1..20: mol_type = other RNA
cgggtgctcctgctggggga

SEQ ID NO: 2050 - RNA, 20 nt, synthetic construct
  misc_feature 1..20: note = Description of Artificial Sequence: Synthetic oligonucleotide
  source 1..20: mol_type = other RNA
tgctcttttattcctcacca

SEQ ID NO: 2051 - RNA, 20 nt, synthetic construct
  misc_feature 1..20: note = Description of Artificial Sequence: Synthetic oligonucleotide
  source 1..20: mol_type = other RNA
aaatactgtaaagaggtacg

SEQ ID NO: 2052 - RNA, 20 nt, synthetic construct
  misc_feature 1..20: note = Description of Artificial Sequence: Synthetic oligonucleotide
  source 1..20: mol_type = other RNA
ggccagcagtgaacacccct

SEQ ID NO: 2053 - RNA, 20 nt, synthetic construct
  misc_feature 1..20: note = Description of Artificial Sequence: Synthetic oligonucleotide
  source 1..20: mol_type = other RNA
gccagcagtgaacacccctt

SEQ ID NO: 2054 - RNA, 20 nt, synthetic construct
  misc_feature 1..20: note = Description of Artificial Sequence: Synthetic oligonucleotide
  source 1..20: mol_type = other RNA
cagtgaacaccccttgggcg

SEQ ID NO: 2055 - RNA, 20 nt, synthetic construct
  misc_feature 1..20: note = Description of Artificial Sequence: Synthetic oligonucleotide
  source 1..20: mol_type = other RNA
ggctgtggtggggactgcgg

SEQ ID NO: 2056 - RNA, 20 nt, synthetic construct
  misc_feature 1..20: note = Description of Artificial Sequence: Synthetic oligonucleotide
  source 1..20: mol_type = other RNA
atgtggccacactgcccctc

SEQ ID NO: 2057 - RNA, 20 nt, synthetic construct
  misc_feature 1..20: note = Description of Artificial Sequence: Synthetic oligonucleotide
  source 1..20: mol_type = other RNA
ggccacactgcccctcagga

SEQ ID NO: 2058 - RNA, 20 nt, synthetic construct
  misc_feature 1..20: note = Description of Artificial Sequence: Synthetic oligonucleotide
  source 1..20: mol_type = other RNA
cctcaggaaggttctggctg

SEQ ID NO: 2059 - RNA, 20 nt, synthetic construct
  misc_feature 1..20: note = Description of Artificial Sequence: Synthetic oligonucleotide
  source 1..20: mol_type = other RNA
catgcgggtgctcctgctgg

SEQ ID NO: 2060 - RNA, 20 nt, synthetic construct
  misc_feature 1..20: note = Description of Artificial Sequence: Synthetic oligonucleotide
  source 1..20: mol_type = other RNA
aagaggtacgtggacttggg

SEQ ID NO: 2061 - RNA, 20 nt, synthetic construct
  misc_feature 1..20: note = Description of Artificial Sequence: Synthetic oligonucleotide
  source 1..20: mol_type = other RNA
ggaaggttctggctgtggtg

SEQ ID NO: 2062 - RNA, 20 nt, synthetic construct
  misc_feature 1..20: note = Description of Artificial Sequence: Synthetic oligonucleotide
  source 1..20: mol_type = other RNA
gctgggggatgtggccacac

SEQ ID NO: 2063 - RNA, 20 nt, synthetic construct
  misc_feature 1..20: note = Description of Artificial Sequence: Synthetic oligonucleotide
  source 1..20: mol_type = other RNA
gtaaagaggtacgtggactt

SEQ ID NO: 2064 - RNA, 20 nt, synthetic construct
  misc_feature 1..20: note = Description of Artificial Sequence: Synthetic oligonucleotide
  source 1..20: mol_type = other RNA
tgtggccacactgcccctca

SEQ ID NO: 2065 - RNA, 20 nt, synthetic construct
  misc_feature 1..20: note = Description of Artificial Sequence: Synthetic oligonucleotide
  source 1..20: mol_type = other RNA
ctgcccctcaggaaggttct

SEQ ID NO: 2066 - RNA, 20 nt, synthetic construct
  misc_feature 1..20: note = Description of Artificial Sequence: Synthetic oligonucleotide
  source 1..20: mol_type = other RNA
aatactgtaaagaggtacgt

SEQ ID NO: 2067 - RNA, 20 nt, synthetic construct
  misc_feature 1..20: note = Description of Artificial Sequence: Synthetic oligonucleotide
  source 1..20: mol_type = other RNA
ggccctgccctccccgccaa

SEQ ID NO: 2068 - RNA, 20 nt, synthetic construct
  misc_feature 1..20: note = Description of Artificial Sequence: Synthetic oligonucleotide
  source 1..20: mol_type = other RNA
ggtgctcctgctgggggatg

SEQ ID NO: 2069 - RNA, 20 nt, synthetic construct
  misc_feature 1..20: note = Description of Artificial Sequence: Synthetic oligonucleotide
  source 1..20: mol_type = other RNA
actgcccctcaggaaggttc

SEQ ID NO: 2070 - RNA, 20 nt, synthetic construct
  misc_feature 1..20: note = Description of Artificial Sequence: Synthetic oligonucleotide
  source 1..20: mol_type = other RNA
aggaaggttctggctgtggt

SEQ ID NO: 2071 - RNA, 20 nt, synthetic construct
  misc_feature 1..20: note = Description of Artificial Sequence: Synthetic oligonucleotide
  source 1..20: mol_type = other RNA
gggcgtggccctgccctccc

SEQ ID NO: 2072 - RNA, 20 nt, synthetic construct
  misc_feature 1..20: note = Description of Artificial Sequence: Synthetic oligonucleotide
  source 1..20: mol_type = other RNA
gaacaccccttgggcgtggc

SEQ ID NO: 2073 - RNA, 20 nt, synthetic construct
  misc_feature 1..20: note = Description of Artificial Sequence: Synthetic oligonucleotide
  source 1..20: mol_type = other RNA
aggtacgtggacttgggcgt

SEQ ID NO: 2074 - RNA, 20 nt, synthetic construct
  misc_feature 1..20: note = Description of Artificial Sequence: Synthetic oligonucleotide
  source 1..20: mol_type = other RNA
agcagtgaacaccccttggg

SEQ ID NO: 2075 - RNA, 20 nt, synthetic construct
  misc_feature 1..20: note = Description of Artificial Sequence: Synthetic oligonucleotide
  source 1..20: mol_type = other RNA
ccagcagtgaacaccccttg

SEQ ID NO: 2076 - RNA, 20 nt, synthetic construct
  misc_feature 1..20: note = Description of Artificial Sequence: Synthetic oligonucleotide
  source 1..20: mol_type = other RNA
gggactgcggaggccagcag

SEQ ID NO: 2077 - RNA, 20 nt, synthetic construct
  misc_feature 1..20: note = Description of Artificial Sequence: Synthetic oligonucleotide
  source 1..20: mol_type = other RNA
tggggactgcggaggccagc

SEQ ID NO: 2078 - RNA, 20 nt, synthetic construct
  misc_feature 1..20: note = Description of Artificial Sequence: Synthetic oligonucleotide
  source 1..20: mol_type = other RNA
gctgtggtggggactgcgga

SEQ ID NO: 2079 - RNA, 20 nt, synthetic construct
  misc_feature 1..20: note = Description of Artificial Sequence: Synthetic oligonucleotide
  source 1..20: mol_type = other RNA
gccacactgcccctcaggaa

SEQ ID NO: 2080 - RNA, 20 nt, synthetic construct
  misc_feature 1..20: note = Description of Artificial Sequence: Synthetic oligonucleotide
  source 1..20: mol_type = other RNA
caggaaggttctggctgtgg

SEQ ID NO: 2081 - RNA, 20 nt, synthetic construct
  misc_feature 1..20: note = Description of Artificial Sequence: Synthetic oligonucleotide
  source 1..20: mol_type = other RNA
ctggctgtggtggggactgc

SEQ ID NO: 2082 - RNA, 20 nt, synthetic construct
  misc_feature 1..20: note = Description of Artificial Sequence: Synthetic oligonucleotide
  source 1..20: mol_type = other RNA
ctcaggaaggttctggctgt

SEQ ID NO: 2083 - RNA, 20 nt, synthetic construct
  misc_feature 1..20: note = Description of Artificial Sequence: Synthetic oligonucleotide
  source 1..20: mol_type = other RNA
gaaggttctggctgtggtgg

SEQ ID NO: 2084 - RNA, 20 nt, synthetic construct
  misc_feature 1..20: note = Description of Artificial Sequence: Synthetic oligonucleotide
  source 1..20: mol_type = other RNA
gttctggctgtggtggggac

SEQ ID NO: 2085 - RNA, 20 nt, synthetic construct
  misc_feature 1..20: note = Description of Artificial Sequence: Synthetic oligonucleotide
  source 1..20: mol_type = other RNA
cccctcaggaaggttctggc

SEQ ID NO: 2086 - RNA, 20 nt, synthetic construct
  misc_feature 1..20: note = Description of Artificial Sequence: Synthetic oligonucleotide
  source 1..20: mol_type = other RNA
tggtggggactgcggaggcc

SEQ ID NO: 2087 - RNA, 20 nt, synthetic construct
  misc_feature 1..20: note = Description of Artificial Sequence: Synthetic oligonucleotide
  source 1..20: mol_type = other RNA
tctggctgtggtggggactg

SEQ ID NO: 2088 - RNA, 20 nt, synthetic construct
  misc_feature 1..20: note = Description of Artificial Sequence: Synthetic oligonucleotide
  source 1..20: mol_type = other RNA
agtgaacaccccttgggcgt

SEQ ID NO: 2089 - RNA, 20 nt, synthetic construct
  misc_feature 1..20: note = Description of Artificial Sequence: Synthetic oligonucleotide
  source 1..20: mol_type = other RNA
tcatgcgggtgctcctgctg

SEQ ID NO: 2090 - RNA, 20 nt, synthetic construct
  misc_feature 1..20: note = Description of Artificial Sequence: Synthetic oligonucleotide
  source 1..20: mol_type = other RNA
gaggtacgtggacttgggcg

SEQ ID NO: 2091 - RNA, 20 nt, synthetic construct
  misc_feature 1..20: note = Description of Artificial Sequence: Synthetic oligonucleotide
  source 1..20: mol_type = other RNA
gcagtcaccaaatactgtaa

SEQ ID NO: 2092 - RNA, 20 nt, synthetic construct
  misc_feature 1..20: note = Description of Artificial Sequence: Synthetic oligonucleotide
  source 1..20: mol_type = other RNA
cgtggacttgggcgtggccc

SEQ ID NO: 2093 - RNA, 20 nt, synthetic construct
  misc_feature 1..20: note = Description of Artificial Sequence: Synthetic oligonucleotide
  source 1..20: mol_type = other RNA
gtcaccaaatactgtaaaga

SEQ ID NO: 2094 - RNA, 20 nt, synthetic construct
  misc_feature 1..20: note = Description of Artificial Sequence: Synthetic oligonucleotide
  source 1..20: mol_type = other RNA
taaagaggtacgtggacttg

SEQ ID NO: 2095 - RNA, 20 nt, synthetic construct
  misc_feature 1..20: note = Description of Artificial Sequence: Synthetic oligonucleotide
  source 1..20: mol_type = other RNA
ccaaatactgtaaagaggta

SEQ ID NO: 2096 - RNA, 20 nt, synthetic construct
  misc_feature 1..20: note = Description of Artificial Sequence: Synthetic oligonucleotide
  source 1..20: mol_type = other RNA
gcgtggcagtcaccaaatac

SEQ ID NO: 2097 - RNA, 130 nt, synthetic construct
  misc_feature 1..130: note = Description of Artificial Sequence: Synthetic polynucleotide
  source 1..130: mol_type = other RNA
acgtacctctttacagtattgttttagagctagaaatagcaagttaaaataaggctagtccgttatcaacttgaaaaagtggcaccgagtcggtgcaccccttgggcgtggcagtcaccaaatactgtaa

SEQ ID NO: 2098 - RNA, 131 nt, synthetic construct
  misc_feature 1..131: note = Description of Artificial Sequence: Synthetic polynucleotide
  source 1..131: mol_type = other RNA
acgtacctctttacagtattgttttagagctagaaatagcaagttaaaataaggctagtccgttatcaacttgaaaaagtggcaccgagtcggtgcaccccttgggcgtggcagtcaccaaatactgtaaa

SEQ ID NO: 2099 - RNA, 132 nt, synthetic construct
  misc_feature 1..132: note = Description of Artificial Sequence: Synthetic polynucleotide
  source 1..132: mol_type = other RNA
acgtacctctttacagtattgttttagagctagaaatagcaagttaaaataaggctagtccgttatcaacttgaaaaagtggcaccgagtcggtgcacaccccttgggcgtggcagtcaccaaatactgtaa

SEQ ID NO: 2100 - RNA, 132 nt, synthetic construct
  misc_feature 1..132: note = Description of Artificial Sequence: Synthetic polynucleotide
  source 1..132: mol_type = other RNA
acgtacctctttacagtattgttttagagctagaaatagcaagttaaaataaggctagtccgttatcaacttgaaaaagtggcaccgagtcggtgcaccccttgggcgtggcagtcaccaaatactgtaaag

SEQ ID NO: 2101 - RNA, 133 nt, synthetic construct
  misc_feature 1..133: note = Description of Artificial Sequence: Synthetic polynucleotide
  source 1..133: mol_type = other RNA
acgtacctctttacagtattgttttagagctagaaatagcaagttaaaataaggctagtccgttatcaacttgaaaaagtggcaccgagtcggtgcacaccccttgggcgtggcagtcaccaaatactgtaaa

SEQ ID NO: 2102 - RNA, 133 nt, synthetic construct
  misc_feature 1..133: note = Description of Artificial Sequence: Synthetic polynucleotide
  source 1..133: mol_type = other RNA
acgtacctctttacagtattgttttagagctagaaatagcaagttaaaataaggctagtccgttatcaacttgaaaaagtggcaccgagtcggtgcaacaccccttgggcgtggcagtcaccaaatactgtaa

SEQ ID NO: 2103 - RNA, 133 nt, synthetic construct
  misc_feature 1..133: note = Description of Artificial Sequence: Synthetic polynucleotide
  source 1..133: mol_type = other RNA
acgtacctctttacagtattgttttagagctagaaatagcaagttaaaataaggctagtccgttatcaacttgaaaaagtggcaccgagtcggtgcaccccttgggcgtggcagtcaccaaatactgtaaaga

SEQ ID NO: 2104 - RNA, 134 nt, synthetic construct
  misc_feature 1..134: note = Description of Artificial Sequence: Synthetic polynucleotide
  source 1..134: mol_type = other RNA
acgtacctctttacagtattgttttagagctagaaatagcaagttaaaataaggctagtccgttatcaacttgaaaaagtggcaccgagtcggtgcaacaccccttgggcgtggcagtcaccaaatactgtaaa

SEQ ID NO: 2105 - RNA, 134 nt, synthetic construct
  misc_feature 1..134: note = Description of Artificial Sequence: Synthetic polynucleotide
  source 1..134: mol_type = other RNA
acgtacctctttacagtattgttttagagctagaaatagcaagttaaaataaggctagtccgttatcaacttgaaaaagtggcaccgagtcggtgcaccccttgggcgtggcagtcaccaaatactgtaaagag

SEQ ID NO: 2106 - RNA, 134 nt, synthetic construct
  misc_feature 1..134: note = Description of Artificial Sequence: Synthetic polynucleotide
  source 1..134: mol_type = other RNA
acgtacctctttacagtattgttttagagctagaaatagcaagttaaaataaggctagtccgttatcaacttgaaaaagtggcaccgagtcggtgcacaccccttgggcgtggcagtcaccaaatactgtaaag

SEQ ID NO: 2107 - RNA, 134 nt, synthetic construct
  misc_feature 1..134: note = Description of Artificial Sequence: Synthetic polynucleotide
  source 1..134: mol_type = other RNA
acgtacctctttacagtattgttttagagctagaaatagcaagttaaaataaggctagtccgttatcaacttgaaaaagtggcaccgagtcggtgcgaacaccccttgggcgtggcagtcaccaaatactgtaa

SEQ ID NO: 2108 - RNA, 135 nt, synthetic construct
  misc_feature 1..135: note = Description of Artificial Sequence: Synthetic polynucleotide
  source 1..135: mol_type = other RNA
acgtacctctttacagtattgttttagagctagaaatagcaagttaaaataaggctagtccgttatcaacttgaaaaagtggcaccgagtcggtgcgaacaccccttgggcgtggcagtcaccaaatactgtaaa

SEQ ID NO: 2109 - RNA, 135 nt, synthetic construct
  misc_feature 1..135: note = Description of Artificial Sequence: Synthetic polynucleotide
  source 1..135: mol_type = other RNA
acgtacctctttacagtattgttttagagctagaaatagcaagttaaaataaggctagtccgttatcaacttgaaaaagtggcaccgagtcggtgcaccccttgggcgtggcagtcaccaaatactgtaaagagg

SEQ ID NO: 2110 - RNA, 135 nt, synthetic construct
  misc_feature 1..135: note = Description of Artificial Sequence: Synthetic polynucleotide
  source 1..135: mol_type = other RNA
acgtacctctttacagtattgttttagagctagaaatagcaagttaaaataaggctagtccgttatcaacttgaaaaagtggcaccgagtcggtgctgaacaccccttgggcgtggcagtcaccaaatactgtaa

SEQ ID NO: 2111 - RNA, 135 nt, synthetic construct
  misc_feature 1..135: note = Description of Artificial Sequence: Synthetic polynucleotide
  source 1..135: mol_type = other RNA
acgtacctctttacagtattgttttagagctagaaatagcaagttaaaataaggctagtccgttatcaacttgaaaaagtggcaccgagtcggtgcaacaccccttgggcgtggcagtcaccaaatactgtaaag

SEQ ID NO: 2112 - RNA, 135 nt, synthetic construct
  misc_feature 1..135: note = Description of Artificial Sequence: Synthetic polynucleotide
  source 1..135: mol_type = other RNA
acgtacctctttacagtattgttttagagctagaaatagcaagttaaaataaggctagtccgttatcaacttgaaaaagtggcaccgagtcggtgcacaccccttgggcgtggcagtcaccaaatactgtaaaga

SEQ ID NO: 2113 - RNA, 136 nt, synthetic construct
  misc_feature 1..136: note = Description of Artificial Sequence: Synthetic polynucleotide
  source 1..136: mol_type = other RNA
acgtacctctttacagtattgttttagagctagaaatagcaagttaaaataaggctagtccgttatcaacttgaaaaagtggcaccgagtcggtgcgaacaccccttgggcgtggcagtcaccaaatactgtaaag

SEQ ID NO: 2114 - RNA, 136 nt, synthetic construct
  misc_feature 1..136: note = Description of Artificial Sequence: Synthetic polynucleotide
  source 1..136: mol_type = other RNA
acgtacctctttacagtattgttttagagctagaaatagcaagttaaaataaggctagtccgttatcaacttgaaaaagtggcaccgagtcggtgcacaccccttgggcgtggcagtcaccaaatactgtaaagag

SEQ ID NO: 2115 - RNA, 136 nt, synthetic construct
  misc_feature 1..136: note = Description of Artificial Sequence: Synthetic polynucleotide
  source 1..136: mol_type = other RNA
acgtacctctttacagtattgttttagagctagaaatagcaagttaaaataaggctagtccgttatcaacttgaaaaagtggcaccgagtcggtgcaacaccccttgggcgtggcagtcaccaaatactgtaaaga

SEQ ID NO: 2116 - RNA, 136 nt, synthetic construct
  misc_feature 1..136: note = Description of Artificial Sequence: Synthetic polynucleotide
  source 1..136: mol_type = other RNA
acgtacctctttacagtattgttttagagctagaaatagcaagttaaaataaggctagtccgttatcaacttgaaaaagtggcaccgagtcggtgctgaacaccccttgggcgtggcagtcaccaaatactgtaaa

SEQ ID NO: 2117 - RNA, 136 nt, synthetic construct
  misc_feature 1..136: note = Description of Artificial Sequence: Synthetic polynucleotide
  source 1..136: mol_type = other RNA
acgtacctctttacagtattgttttagagctagaaatagcaagttaaaataaggctagtccgttatcaacttgaaaaagtggcaccgagtcggtgcaccccttgggcgtggcagtcaccaaatactgtaaagaggt

SEQ ID NO: 2118 - RNA, 136 nt, synthetic construct
  misc_feature 1..136: note = Description of Artificial Sequence: Synthetic polynucleotide
  source 1..136: mol_type = other RNA
acgtacctctttacagtattgttttagagctagaaatagcaagttaaaataaggctagtccgttatcaacttgaaaaagtggcaccgagtcggtgcgtgaacaccccttgggcgtggcagtcaccaaatactgtaa

SEQ ID NO: 2119 - RNA, 137 nt, synthetic construct
  misc_feature 1..137: note = Description of Artificial Sequence: Synthetic polynucleotide
  source 1..137: mol_type = other RNA
acgtacctctttacagtattgttttagagctagaaatagcaagttaaaataaggctagtccgttatcaacttgaaaaagtggcaccgagtcggtgcacaccccttgggcgtggcagtcaccaaatactgtaaagagg

SEQ ID NO: 2120 - RNA, 137 nt, synthetic construct
  misc_feature 1..137: note = Description of Artificial Sequence: Synthetic polynucleotide
  source 1..137: mol_type = other RNA
acgtacctctttacagtattgttttagagctagaaatagcaagttaaaataaggctagtccgttatcaacttgaaaaagtggcaccgagtcggtgcgtgaacaccccttgggcgtggcagtcaccaaatactgtaaa

SEQ ID NO: 2121 - RNA, 137 nt, synthetic construct
  misc_feature 1..137: note = Description of Artificial Sequence: Synthetic polynucleotide
  source 1..137: mol_type = other RNA
acgtacctctttacagtattgttttagagctagaaatagcaagttaaaataaggctagtccgttatcaacttgaaaaagtggcaccgagtcggtgcaacaccccttgggcgtggcagtcaccaaatactgtaaagag

SEQ ID NO: 2122 - RNA, 137 nt, synthetic construct
  misc_feature 1..137: note = Description of Artificial Sequence: Synthetic polynucleotide
  source 1..137: mol_type = other RNA
acgtacctctttacagtattgttttagagctagaaatagcaagttaaaataaggctagtccgttatcaacttgaaaaagtggcaccgagtcggtgcgaacaccccttgggcgtggcagtcaccaaatactgtaaaga

SEQ ID NO: 2123 - RNA, 137 nt, synthetic construct
  misc_feature 1..137: note = Description of Artificial Sequence: Synthetic polynucleotide
  source 1..137: mol_type = other RNA
acgtacctctttacagtattgttttagagctagaaatagcaagttaaaataaggctagtccgttatcaacttgaaaaagtggcaccgagtcggtgcagtgaacaccccttgggcgtggcagtcaccaaatactgtaa

SEQ ID NO: 2124 - RNA, 137 nt, synthetic construct
  misc_feature 1..137: note = Description of Artificial Sequence: Synthetic polynucleotide
  source 1..137: mol_type = other RNA
acgtacctctttacagtattgttttagagctagaaatagcaagttaaaataaggctagtccgttatcaacttgaaaaagtggcaccgagtcggtgctgaacaccccttgggcgtggcagtcaccaaatactgtaaag

SEQ ID NO: 2125 - RNA, 137 nt, synthetic construct
  misc_feature 1..137: note = Description of Artificial Sequence: Synthetic polynucleotide
  source 1..137: mol_type = other RNA
acgtacctctttacagtattgttttagagctagaaatagcaagttaaaataaggctagtccgttatcaacttgaaaaagtggcaccgagtcggtgcaccccttgggcgtggcagtcaccaaatactgtaaagaggta

SEQ ID NO: 2126 - RNA, 138 nt, synthetic construct
  misc_feature 1..138: note = Description of Artificial Sequence: Synthetic polynucleotide
  source 1..138: mol_type = other RNA
acgtacctctttacagtattgttttagagctagaaatagcaagttaaaataaggctagtccgttatcaacttgaaaaagtggcaccgagtcggtgcgaacaccccttgggcgtggcagtcaccaaatactgtaaagag

SEQ ID NO: 2127 - RNA, 138 nt, synthetic construct
  misc_feature 1..138: note = Description of Artificial Sequence: Synthetic polynucleotide
  source 1..138: mol_type = other RNA
acgtacctctttacagtattgttttagagctagaaatagcaagttaaaataaggctagtccgttatcaacttgaaaaagtggcaccgagtcggtgctgaacaccccttgggcgtggcagtcaccaaatactgtaaaga

SEQ ID NO: 2128 - RNA, 138 nt, synthetic construct
  misc_feature 1..138: note = Description of Artificial Sequence: Synthetic polynucleotide
  source 1..138: mol_type = other RNA
acgtacctctttacagtattgttttagagctagaaatagcaagttaaaataaggctagtccgttatcaacttgaaaaagtggcaccgagtcggtgcacaccccttgggcgtggcagtcaccaaatactgtaaagaggt

SEQ ID NO: 2129 - RNA, 138 nt, synthetic construct
  misc_feature 1..138: note = Description of Artificial Sequence: Synthetic polynucleotide
  source 1..138: mol_type = other RNA
acgtacctctttacagtattgttttagagctagaaatagcaagttaaaataaggctagtccgttatcaacttgaaaaagtggcaccgagtcggtgcaacaccccttgggcgtggcagtcaccaaatactgtaaagagg

SEQ ID NO: 2130 - RNA, 138 nt, synthetic construct
  misc_feature 1..138: note = Description of Artificial Sequence: Synthetic polynucleotide
  source 1..138: mol_type = other RNA
gacgtacctctttacagtattgttttagagctagaaatagcaagttaaaataaggctagtccgttatcaacttgaaaaagtggcaccgagtcggtgcaccccttgggcgtggcagtcaccaaatactgtaattttttt

SEQ ID NO: 2131 - RNA, 138 nt, synthetic construct
  misc_feature 1..138: note = Description of Artificial Sequence: Synthetic polynucleotide
  source 1..138: mol_type = other RNA
acgtacctctttacagtattgttttagagctagaaatagcaagttaaaataaggctagtccgttatcaacttgaaaaagtggcaccgagtcggtgcgtgaacaccccttgggcgtggcagtcaccaaatactgtaaag

SEQ ID NO: 2132 - RNA, 138 nt, synthetic construct
  misc_feature 1..138: note = Description of Artificial Sequence: Synthetic polynucleotide
  source 1..138: mol_type = other RNA
acgtacctctttacagtattgttttagagctagaaatagcaagttaaaataaggctagtccgttatcaacttgaaaaagtggcaccgagtcggtgcagtgaacaccccttgggcgtggcagtcaccaaatactgtaaa

SEQ ID NO: 2133 - RNA, 139 nt, synthetic construct
  misc_feature 1..139: note = Description of Artificial Sequence: Synthetic polynucleotide
  source 1..139: mol_type = other RNA
acgtacctctttacagtattgttttagagctagaaatagcaagttaaaataaggctagtccgttatcaacttgaaaaagtggcaccgagtcggtgctgaacaccccttgggcgtggcagtcaccaaatactgtaaagag

SEQ ID NO: 2134 - RNA, 139 nt, synthetic construct
  misc_feature 1..139: note = Description of Artificial Sequence: Synthetic polynucleotide
  source 1..139: mol_type = other RNA
acgtacctctttacagtattgttttagagctagaaatagcaagttaaaataaggctagtccgttatcaacttgaaaaagtggcaccgagtcggtgcaacaccccttgggcgtggcagtcaccaaatactgtaaagaggt

SEQ ID NO: 2135 - RNA, 139 nt, synthetic construct
  misc_feature 1..139: note = Description of Artificial Sequence: Synthetic polynucleotide
  source 1..139: mol_type = other RNA
acgtacctctttacagtattgttttagagctagaaatagcaagttaaaataaggctagtccgttatcaacttgaaaaagtggcaccgagtcggtgcgaacaccccttgggcgtggcagtcaccaaatactgtaaagagg

SEQ ID NO: 2136 - RNA, 139 nt, synthetic construct
  misc_feature 1..139: note = Description of Artificial Sequence: Synthetic polynucleotide
  source 1..139: mol_type = other RNA
acgtacctctttacagtattgttttagagctagaaatagcaagttaaaataaggctagtccgttatcaacttgaaaaagtggcaccgagtcggtgcagtgaacaccccttgggcgtggcagtcaccaaatactgtaaag

SEQ ID NO: 2137 - RNA, 139 nt, synthetic construct
  misc_feature 1..139: note = Description of Artificial Sequence: Synthetic polynucleotide
  source 1..139: mol_type = other RNA
acgtacctctttacagtattgttttagagctagaaatagcaagttaaaataaggctagtccgttatcaacttgaaaaagtggcaccgagtcggtgcgtgaacaccccttgggcgtggcagtcaccaaatactgtaaaga

SEQ ID NO: 2138 - RNA, 139 nt, synthetic construct
  misc_feature 1..139: note = Description of Artificial Sequence: Synthetic polynucleotide
  source 1..139: mol_type = other RNA
acgtacctctttacagtattgttttagagctagaaatagcaagttaaaataaggctagtccgttatcaacttgaaaaagtggcaccgagtcggtgcacaccccttgggcgtggcagtcaccaaatactgtaaagaggta

SEQ ID NO: 2139 - RNA, 139 nt, synthetic construct
  misc_feature 1..139: note = Description of Artificial Sequence: Synthetic polynucleotide
  source 1..139: mol_type = other RNA
gacgtacctctttacagtattgttttagagctagaaatagcaagttaaaataaggctagtccgttatcaacttgaaaaagtggcaccgagtcggtgcaccccttgggcgtggcagtcaccaaatactgtaaattttttt

SEQ ID NO: 2140 - RNA, 139 nt, synthetic construct
  misc_feature 1..139: note = Description of Artificial Sequence: Synthetic polynucleotide
  source 1..139: mol_type = other RNA
acgtacctctttacagtattgttttagagctagaaatagcaagttaaaataaggctagtccgttatcaacttgaaaaagtggcaccgagtcggtgcgcagtgaacaccccttgggcgtggcagtcaccaaatactgtaa

SEQ ID NO: 2141 - RNA, 140 nt, synthetic construct
  misc_feature 1..140: note = Description of Artificial Sequence: Synthetic polynucleotide
  source 1..140: mol_type = other RNA
gacgtacctctttacagtattgttttagagctagaaatagcaagttaaaataaggctagtccgttatcaacttgaaaaagtggcaccgagtcggtgcaccccttgggcgtggcagtcaccaaatactgtaaagttttttt

SEQ ID NO: 2142 - RNA, 140 nt, synthetic construct
  misc_feature 1..140: note = Description of Artificial Sequence: Synthetic polynucleotide
  source 1..140: mol_type = other RNA
acgtacctctttacagtattgttttagagctagaaatagcaagttaaaataaggctagtccgttatcaacttgaaaaagtggcaccgagtcggtgcgtgaacaccccttgggcgtggcagtcaccaaatactgtaaagag

SEQ ID NO: 2143 - RNA, 140 nt, synthetic construct
  misc_feature 1..140: note = Description of Artificial Sequence: Synthetic polynucleotide
  source 1..140: mol_type = other RNA
gacgtacctctttacagtattgttttagagctagaaatagcaagttaaaataaggctagtccgttatcaacttgaaaaagtggcaccgagtcggtgcacaccccttgggcgtggcagtcaccaaatactgtaattttttt

SEQ ID NO: 2144 - RNA, 140 nt, synthetic construct
  misc_feature 1..140: note = Description of Artificial Sequence: Synthetic polynucleotide
  source 1..140: mol_type = other RNA
acgtacctctttacagtattgttttagagctagaaatagcaagttaaaataaggctagtccgttatcaacttgaaaaagtggcaccgagtcggtgcagcagtgaacaccccttgggcgtggcagtcaccaaatactgtaa

SEQ ID NO: 2145 - RNA, 140 nt, synthetic construct
  misc_feature 1..140: note = Description of Artificial Sequence: Synthetic polynucleotide
  source 1..140: mol_type = other RNA
acgtacctctttacagtattgttttagagctagaaatagcaagttaaaataaggctagtccgttatcaacttgaaaaagtggcaccgagtcggtgcgaacaccccttgggcgtggcagtcaccaaatactgtaaagaggt

SEQ ID NO: 2146 - RNA, 140 nt, synthetic construct
  misc_feature 1..140: note = Description of Artificial Sequence: Synthetic polynucleotide
  source 1..140: mol_type = other RNA
acgtacctctttacagtattgttttagagctagaaatagcaagttaaaataaggctagtccgttatcaacttgaaaaagtggcaccgagtcggtgcagtgaacaccccttgggcgtggcagtcaccaaatactgtaaaga

SEQ ID NO: 2147 - RNA, 140 nt, synthetic construct
  misc_feature 1..140: note = Description of Artificial Sequence: Synthetic polynucleotide
  source 1..140: mol_type = other RNA
acgtacctctttacagtattgttttagagctagaaatagcaagttaaaataaggctagtccgttatcaacttgaaaaagtggcaccgagtcggtgctgaacaccccttgggcgtggcagtcaccaaatactgtaaagagg

SEQ ID NO: 2148 - RNA, 140 nt, synthetic construct
  misc_feature 1..140: note = Description of Artificial Sequence: Synthetic polynucleotide
  source 1..140: mol_type = other RNA
acgtacctctttacagtattgttttagagctagaaatagcaagttaaaataaggctagtccgttatcaacttgaaaaagtggcaccgagtcggtgcaacaccccttgggcgtggcagtcaccaaatactgtaaagaggta

SEQ ID NO: 2149 - RNA, 140 nt, synthetic construct
  misc_feature 1..140: note = Description of Artificial Sequence: Synthetic polynucleotide
  source 1..140: mol_type = other RNA
acgtacctctttacagtattgttttagagctagaaatagcaagttaaaataaggctagtccgttatcaacttgaaaaagtggcaccgagtcggtgcgcagtgaacaccccttgggcgtggcagtcaccaaatactgtaaa

SEQ ID NO: 2150 - RNA, 141 nt, synthetic construct
  misc_feature 1..141: note = Description of Artificial Sequence: Synthetic polynucleotide
  source 1..141: mol_type = other RNA
acgtacctctttacagtattgttttagagctagaaatagcaagttaaaataaggctagtccgttatcaacttgaaaaagtggcaccgagtcggtgctgaacaccccttgggcgtggcagtcaccaaatactgtaaagaggt

SEQ ID NO: 2151 - RNA, 141 nt, synthetic construct
  misc_feature 1..141: note = Description of Artificial Sequence: Synthetic polynucleotide
  source 1..141: mol_type = other RNA
acgtacctctttacagtattgttttagagctagaaatagcaagttaaaataaggctagtccgttatcaacttgaaaaagtggcaccgagtcggtgcgtgaacaccccttgggcgtggcagtcaccaaatactgtaaagagg

SEQ ID NO: 2152 - RNA, 141 nt, synthetic construct
  misc_feature 1..141: note = Description of Artificial Sequence: Synthetic polynucleotide
  source 1..141: mol_type = other RNA
gacgtacctctttacagtattgttttagagctagaaatagcaagttaaaataaggctagtccgttatcaacttgaaaaagtggcaccgagtcggtgcaccccttgggcgtggcagtcaccaaatactgtaaagattttttt

SEQ ID NO: 2153 - RNA, 141 nt, synthetic construct
  misc_feature 1..141: note = Description of Artificial Sequence: Synthetic polynucleotide
  source 1..141: mol_type = other RNA
gacgtacctctttacagtattgttttagagctagaaatagcaagttaaaataaggctagtccgttatcaacttgaaaaagtggcaccgagtcggtgcaacaccccttgggcgtggcagtcaccaaatactgtaattttttt

SEQ ID NO: 2154 - RNA, 141 nt, synthetic construct
  misc_feature 1..141: note = Description of Artificial Sequence: Synthetic polynucleotide
  source 1..141: mol_type = other RNA
acgtacctctttacagtattgttttagagctagaaatagcaagttaaaataaggctagtccgttatcaacttgaaaaagtggcaccgagtcggtgcgaacaccccttgggcgtggcagtcaccaaatactgtaaagaggta

SEQ ID NO: 2155 - RNA, 141 nt, synthetic construct
  misc_feature 1..141: note = Description of Artificial Sequence: Synthetic polynucleotide
  source 1..141: mol_type = other RNA
acgtacctctttacagtattgttttagagctagaaatagcaagttaaaataaggctagtccgttatcaacttgaaaaagtggcaccgagtcggtgcagcagtgaacaccccttgggcgtggcagtcaccaaatactgtaaa

SEQ ID NO: 2156 - RNA, 141 nt, synthetic construct
  misc_feature 1..141: note = Description of Artificial Sequence: Synthetic polynucleotide
  source 1..141: mol_type = other RNA
acgtacctctttacagtattgttttagagctagaaatagcaagttaaaataaggctagtccgttatcaacttgaaaaagtggcaccgagtcggtgcgcagtgaacaccccttgggcgtggcagtcaccaaatactgtaaag

SEQ ID NO: 2157 - RNA, 141 nt, synthetic construct
  misc_feature 1..141: note = Description of Artificial Sequence: Synthetic polynucleotide
  source 1..141: mol_type = other RNA
gacgtacctctttacagtattgttttagagctagaaatagcaagttaaaataaggctagtccgttatcaacttgaaaaagtggcaccgagtcggtgcacaccccttgggcgtggcagtcaccaaatactgtaaattttttt

SEQ ID NO: 2158 - RNA, 141 nt, synthetic construct
  misc_feature 1..141: note = Description of Artificial Sequence: Synthetic polynucleotide
  source 1..141: mol_type = other RNA
acgtacctctttacagtattgttttagagctagaaatagcaagttaaaataaggctagtccgttatcaacttgaaaaagtggcaccgagtcggtgcagtgaacaccccttgggcgtggcagtcaccaaatactgtaaagag

SEQ ID NO: 2159 - RNA, 142 nt, synthetic construct
  misc_feature 1..142: note = Description of Artificial Sequence: Synthetic polynucleotide
  source 1..142: mol_type = other RNA
gacgtacctctttacagtattgttttagagctagaaatagcaagttaaaataaggctagtccgttatcaacttgaaaaagtggcaccgagtcggtgcaacaccccttgggcgtggcagtcaccaaatactgtaaattttttt

SEQ ID NO: 2160 - RNA, 142 nt, synthetic construct
  misc_feature 1..142: note = Description of Artificial Sequence: Synthetic polynucleotide
  source 1..142: mol_type = other RNA
acgtacctctttacagtattgttttagagctagaaatagcaagttaaaataaggctagtccgttatcaacttgaaaaagtggcaccgagtcggtgcgcagtgaacaccccttgggcgtggcagtcaccaaatactgtaaaga

SEQ ID NO: 2161 - RNA, 142 nt, synthetic construct
  misc_feature 1..142: note = Description of Artificial Sequence: Synthetic polynucleotide
  source 1..142: mol_type = other RNA
acgtacctctttacagtattgttttagagctagaaatagcaagttaaaataaggctagtccgttatcaacttgaaaaagtggcaccgagtcggtgcgtgaacaccccttgggcgtggcagtcaccaaatactgtaaagaggt

SEQ ID NO: 2162 - RNA, 142 nt, synthetic construct
  misc_feature 1..142: note = Description of Artificial Sequence: Synthetic polynucleotide
  source 1..142: mol_type = other RNA
gacgtacctctttacagtattgttttagagctagaaatagcaagttaaaataaggctagtccgttatcaacttgaaaaagtggcaccgagtcggtgcgaacaccccttgggcgtggcagtcaccaaatactgtaattttttt

SEQ ID NO: 2163 - RNA, 142 nt, synthetic construct
  misc_feature 1..142: note = Description of Artificial Sequence: Synthetic polynucleotide
  source 1..142: mol_type = other RNA
gacgtacctctttacagtattgttttagagctagaaatagcaagttaaaataaggctagtccgttatcaacttgaaaaagtggcaccgagtcggtgcacaccccttgggcgtggcagtcaccaaatactgtaaagttttttt

SEQ ID NO: 2164 - RNA, 142 nt, synthetic construct
  misc_feature 1..142: note = Description of Artificial Sequence: Synthetic polynucleotide
  source 1..142: mol_type = other RNA
gacgtacctctttacagtattgttttagagctagaaatagcaagttaaaataaggctagtccgttatcaacttgaaaaagtggcaccgagtcggtgcaccccttgggcgtggcagtcaccaaatactgtaaagagttttttt

SEQ ID NO: 2165 - RNA, 142 nt, synthetic construct
  misc_feature 1..142: note = Description of Artificial Sequence: Synthetic polynucleotide
  source 1..142: mol_type = other RNA
acgtacctctttacagtattgttttagagctagaaatagcaagttaaaataaggctagtccgttatcaacttgaaaaagtggcaccgagtcggtgcagcagtgaacaccccttgggcgtggcagtcaccaaatactgtaaag

SEQ ID NO: 2166 - RNA, 142 nt, synthetic construct
  misc_feature 1..142: note = Description of Artificial Sequence: Synthetic polynucleotide
  source 1..142: mol_type = other RNA
acgtacctctttacagtattgttttagagctagaaatagcaagttaaaataaggctagtccgttatcaacttgaaaaagtggcaccgagtcggtgcagtgaacaccccttgggcgtggcagtcaccaaatactgtaaagagg

SEQ ID NO: 2167 - RNA, 142 nt, synthetic construct
  misc_feature 1..142: note = Description of Artificial Sequence: Synthetic polynucleotide
  source 1..142: mol_type = other RNA
acgtacctctttacagtattgttttagagctagaaatagcaagttaaaataaggctagtccgttatcaacttgaaaaagtggcaccgagtcggtgctgaacaccccttgggcgtggcagtcaccaaatactgtaaagaggta

SEQ ID NO: 2168 - RNA, 143 nt, synthetic construct
  misc_feature 1..143: note = Description of Artificial Sequence: Synthetic polynucleotide
  source 1..143: mol_type = other RNA
acgtacctctttacagtattgttttagagctagaaatagcaagttaaaataaggctagtccgttatcaacttgaaaaagtggcaccgagtcggtgcagtgaacaccccttgggcgtggcagtcaccaaatactgtaaagaggt

SEQ ID NO: 2169 - RNA, 143 nt, synthetic construct
  misc_feature 1..143: note = Description of Artificial Sequence: Synthetic polynucleotide
  source 1..143: mol_type = other RNA
acgtacctctttacagtattgttttagagctagaaatagcaagttaaaataaggctagtccgttatcaacttgaaaaagtggcaccgagtcggtgcgccagcagtgaacaccccttgggcgtggcagtcaccaaatactgtaa

SEQ ID NO: 2170 - RNA, 143 nt, synthetic construct
  misc_feature 1..143: note = Description of Artificial Sequence: Synthetic polynucleotide
  source 1..143: mol_type = other RNA
acgtacctctttacagtattgttttagagctagaaatagcaagttaaaataaggctagtccgttatcaacttgaaaaagtggcaccgagtcggtgcgtgaacaccccttgggcgtggcagtcaccaaatactgtaaagaggta

SEQ ID NO: 2171 - RNA, 143 nt, synthetic construct
  misc_feature 1..143: note = Description of Artificial Sequence: Synthetic polynucleotide
  source 1..143: mol_type = other RNA
acgtacctctttacagtattgttttagagctagaaatagcaagttaaaataaggctagtccgttatcaacttgaaaaagtggcaccgagtcggtgcagcagtgaacaccccttgggcgtggcagtcaccaaatactgtaaaga

SEQ ID NO: 2172 - RNA, 143 nt, synthetic construct
  misc_feature 1..143: note = Description of Artificial Sequence: Synthetic polynucleotide
  source 1..143: mol_type = other RNA
gacgtacctctttacagtattgttttagagctagaaatagcaagttaaaataaggctagtccgttatcaacttgaaaaagtggcaccgagtcggtgcgaacaccccttgggcgtggcagtcaccaaatactgtaaattttttt

SEQ ID NO: 2173 - RNA, 143 nt, synthetic construct
  misc_feature 1..143: note = Description of Artificial Sequence: Synthetic polynucleotide
  source 1..143: mol_type = other RNA
gacgtacctctttacagtattgttttagagctagaaatagcaagttaaaataaggctagtccgttatcaacttgaaaaagtggcaccgagtcggtgcaacaccccttgggcgtggcagtcaccaaatactgtaaagttttttt

SEQ ID NO: 2174 - RNA, 143 nt, synthetic construct
  misc_feature 1..143: note = Description of Artificial Sequence: Synthetic polynucleotide
  source 1..143: mol_type = other RNA
acgtacctctttacagtattgttttagagctagaaatagcaagttaaaataaggctagtccgttatcaacttgaaaaagtggcaccgagtcggtgcgcagtgaacaccccttgggcgtggcagtcaccaaatactgtaaagag

SEQ ID NO: 2175 - RNA, 143 nt, synthetic construct
  misc_feature 1..143: note = Description of Artificial Sequence: Synthetic polynucleotide
  source 1..143: mol_type = other RNA
gacgtacctctttacagtattgttttagagctagaaatagcaagttaaaataaggctagtccgttatcaacttgaaaaagtggcaccgagtcggtgcaccccttgggcgtggcagtcaccaaatactgtaaagaggttttttt

SEQ ID NO: 2176 - RNA, 143 nt, synthetic construct
  misc_feature 1..143: note = Description of Artificial Sequence: Synthetic polynucleotide
  source 1..143: mol_type = other RNA
gacgtacctctttacagtattgttttagagctagaaatagcaagttaaaataaggctagtccgttatcaacttgaaaaagtggcaccgagtcggtgctgaacaccccttgggcgtggcagtcaccaaatactgtaattttttt

SEQ ID NO: 2177 - RNA, 143 nt, synthetic construct
  misc_feature 1..143: note = Description of Artificial Sequence: Synthetic polynucleotide
  source 1..143: mol_type = other RNA
gacgtacctctttacagtattgttttagagctagaaatagcaagttaaaataaggctagtccgttatcaacttgaaaaagtggcaccgagtcggtgcacaccccttgggcgtggcagtcaccaaatactgtaaagattttttt

SEQ ID NO: 2178 - RNA, 144 nt, synthetic construct
  misc_feature 1..144: note = Description of Artificial Sequence: Synthetic polynucleotide
  source 1..144: mol_type = other RNA
acgtacctctttacagtattgttttagagctagaaatagcaagttaaaataaggctagtccgttatcaacttgaaaaagtggcaccgagtcggtgcagcagtgaacaccccttgggcgtggcagtcaccaaatactgtaaagag

SEQ ID NO: 2179 - RNA, 144 nt, synthetic construct
  misc_feature 1..144: note = Description of Artificial Sequence: Synthetic polynucleotide
  source 1..144: mol_type = other RNA
acgtacctctttacagtattgttttagagctagaaatagcaagttaaaataaggctagtccgttatcaacttgaaaaagtggcaccgagtcggtgcagtgaacaccccttgggcgtggcagtcaccaaatactgtaaagaggta

SEQ ID NO: 2180 - RNA, 144 nt, synthetic construct
  misc_feature 1..144: note = Description of Artificial Sequence: Synthetic polynucleotide
  source 1..144: mol_type = other RNA
gacgtacctctttacagtattgttttagagctagaaatagcaagttaaaataaggctagtccgttatcaacttgaaaaagtggcaccgagtcggtgctgaacaccccttgggcgtggcagtcaccaaatactgtaaattttttt

SEQ ID NO: 2181 - RNA, 144 nt, synthetic construct
  misc_feature 1..144: note = Description of Artificial Sequence: Synthetic polynucleotide
  source 1..144: mol_type = other RNA
gacgtacctctttacagtattgttttagagctagaaatagcaagttaaaataaggctagtccgttatcaacttgaaaaagtggcaccgagtcggtgcgaacaccccttgggcgtggcagtcaccaaatactgtaaagttttttt

SEQ ID NO: 2182 - RNA, 144 nt, synthetic construct
  misc_feature 1..144: note = Description of Artificial Sequence: Synthetic polynucleotide
  source 1..144: mol_type = other RNA
gacgtacctctttacagtattgttttagagctagaaatagcaagttaaaataaggctagtccgttatcaacttgaaaaagtggcaccgagtcggtgcaccccttgggcgtggcagtcaccaaatactgtaaagaggtttttttt

SEQ ID NO: 2183 - RNA, 144 nt, synthetic construct
  misc_feature 1..144: note = Description of Artificial Sequence: Synthetic polynucleotide
  source 1..144: mol_type = other RNA
acgtacctctttacagtattgttttagagctagaaatagcaagttaaaataaggctagtccgttatcaacttgaaaaagtggcaccgagtcggtgcgccagcagtgaacaccccttgggcgtggcagtcaccaaatactgtaaa

SEQ ID NO: 2184 - RNA, 144 nt, synthetic construct
  misc_feature 1..144: note = Description of Artificial Sequence: Synthetic polynucleotide
  source 1..144: mol_type = other RNA
gacgtacctctttacagtattgttttagagctagaaatagcaagttaaaataaggctagtccgttatcaacttgaaaaagtggcaccgagtcggtgcaacaccccttgggcgtggcagtcaccaaatactgtaaagattttttt

SEQ ID NO: 2185 - RNA, 144 nt, synthetic construct
  misc_feature 1..144: note = Description of Artificial Sequence: Synthetic polynucleotide
  source 1..144: mol_type = other RNA
gacgtacctctttacagtattgttttagagctagaaatagcaagttaaaataaggctagtccgttatcaacttgaaaaagtggcaccgagtcggtgcacaccccttgggcgtggcagtcaccaaatactgtaaagagttttttt

SEQ ID NO: 2186 - RNA, 144 nt, synthetic construct
  misc_feature 1..144: note = Description of Artificial Sequence: Synthetic polynucleotide
  source 1..144: mol_type = other RNA
gacgtacctctttacagtattgttttagagctagaaatagcaagttaaaataaggctagtccgttatcaacttgaaaaagtggcaccgagtcggtgcgtgaacaccccttgggcgtggcagtcaccaaatactgtaattttttt

SEQ ID NO: 2187 - RNA, 144 nt, synthetic construct
  misc_feature 1..144: note = Description of Artificial Sequence: Synthetic polynucleotide
  source 1..144: mol_type = other RNA
acgtacctctttacagtattgttttagagctagaaatagcaagttaaaataaggctagtccgttatcaacttgaaaaagtggcaccgagtcggtgcgcagtgaacaccccttgggcgtggcagtcaccaaatactgtaaagagg

SEQ ID NO: 2188 - RNA, 145 nt, synthetic construct
  misc_feature 1..145: note = Description of Artificial Sequence: Synthetic polynucleotide
  source 1..145: mol_type = other RNA
gacgtacctctttacagtattgttttagagctagaaatagcaagttaaaataaggctagtccgttatcaacttgaaaaagtggcaccgagtcggtgcgaacaccccttgggcgtggcagtcaccaaatactgtaaagattttttt

SEQ ID NO: 2189 - RNA, 145 nt, synthetic construct
  misc_feature 1..145: note = Description of Artificial Sequence: Synthetic polynucleotide
  source 1..145: mol_type = other RNA
gacgtacctctttacagtattgttttagagctagaaatagcaagttaaaataaggctagtccgttatcaacttgaaaaagtggcaccgagtcggtgcagtgaacaccccttgggcgtggcagtcaccaaatactgtaattttttt

SEQ ID NO: 2190 - RNA, 145 nt, synthetic construct
  misc_feature 1..145: note = Description of Artificial Sequence: Synthetic polynucleotide
  source 1..145: mol_type = other RNA
gacgtacctctttacagtattgttttagagctagaaatagcaagttaaaataaggctagtccgttatcaacttgaaaaagtggcaccgagtcggtgcgtgaacaccccttgggcgtggcagtcaccaaatactgtaaattttttt

SEQ ID NO: 2191 - RNA, 145 nt, synthetic construct
  misc_feature 1..145: note = Description of Artificial Sequence: Synthetic polynucleotide
  source 1..145: mol_type = other RNA
gacgtacctctttacagtattgttttagagctagaaatagcaagttaaaataaggctagtccgttatcaacttgaaaaagtggcaccgagtcggtgctgaacaccccttgggcgtggcagtcaccaaatactgtaaagttttttt

SEQ ID NO: 2192 - RNA, 145 nt, synthetic construct
  misc_feature 1..145: note = Description of Artificial Sequence: Synthetic polynucleotide
  source 1..145: mol_type = other RNA
gacgtacctctttacagtattgttttagagctagaaatagcaagttaaaataaggctagtccgttatcaacttgaaaaagtggcaccgagtcggtgcacaccccttgggcgtggcagtcaccaaatactgtaaagaggttttttt

SEQ ID NO: 2193 - RNA, 145 nt, synthetic construct
  misc_feature 1..145: note = Description of Artificial Sequence: Synthetic polynucleotide
  source 1..145: mol_type = other RNA
gacgtacctctttacagtattgttttagagctagaaatagcaagttaaaataaggctagtccgttatcaacttgaaaaagtggcaccgagtcggtgcaacaccccttgggcgtggcagtcaccaaatactgtaaagagttttttt

SEQ ID NO: 2194 - RNA, 145 nt, synthetic construct
  misc_feature 1..145: note = Description of Artificial Sequence: Synthetic polynucleotide
  source 1..145: mol_type = other RNA
acgtacctctttacagtattgttttagagctagaaatagcaagttaaaataaggctagtccgttatcaacttgaaaaagtggcaccgagtcggtgcgccagcagtgaacaccccttgggcgtggcagtcaccaaatactgtaaag

SEQ ID NO: 2195 - RNA, 145 nt, synthetic construct
  misc_feature 1..145: note = Description of Artificial Sequence: Synthetic polynucleotide
  source 1..145: mol_type = other RNA
acgtacctctttacagtattgttttagagctagaaatagcaagttaaaataaggctagtccgttatcaacttgaaaaagtggcaccgagtcggtgcagcagtgaacaccccttgggcgtggcagtcaccaaatactgtaaagagg

SEQ ID NO: 2196 - RNA, 145 nt, synthetic construct
  misc_feature 1..145: note = Description of Artificial Sequence: Synthetic polynucleotide
  source 1..145: mol_type = other RNA
gacgtacctctttacagtattgttttagagctagaaatagcaagttaaaataaggctagtccgttatcaacttgaaaaagtggcaccgagtcggtgcaccccttgggcgtggcagtcaccaaatactgtaaagaggtattttttt

SEQ ID NO: 2197 - RNA, 145 nt, synthetic construct
  misc_feature 1..145: note = Description of Artificial Sequence: Synthetic polynucleotide
  source 1..145: mol_type = other RNA
acgtacctctttacagtattgttttagagctagaaatagcaagttaaaataaggctagtccgttatcaacttgaaaaagtggcaccgagtcggtgcgcagtgaacaccccttgggcgtggcagtcaccaaatactgtaaagaggt

SEQ ID NO: 2198 - RNA, 146 nt, synthetic construct
  misc_feature 1..146: note = Description of Artificial Sequence: Synthetic polynucleotide
  source 1..146: mol_type = other RNA
gacgtacctctttacagtattgttttagagctagaaatagcaagttaaaataaggctagtccgttatcaacttgaaaaagtggcaccgagtcggtgcagtgaacaccccttgggcgtggcagtcaccaaatactgtaaattttttt

SEQ ID NO: 2199 - RNA, 146 nt, synthetic construct
  misc_feature 1..146: note = Description of Artificial Sequence: Synthetic polynucleotide
  source 1..146: mol_type = other RNA
acgtacctctttacagtattgttttagagctagaaatagcaagttaaaataaggctagtccgttatcaacttgaaaaagtggcaccgagtcggtgcgcagtgaacaccccttgggcgtggcagtcaccaaatactgtaaagaggta

SEQ ID NO: 2200 - RNA, 146 nt, synthetic construct
  misc_feature 1..146: note = Description of Artificial Sequence: Synthetic polynucleotide
  source 1..146: mol_type = other RNA
acgtacctctttacagtattgttttagagctagaaatagcaagttaaaataaggctagtccgttatcaacttgaaaaagtggcaccgagtcggtgcgccagcagtgaacaccccttgggcgtggcagtcaccaaatactgtaaaga

SEQ ID NO: 2201 - RNA, 146 nt, synthetic construct
  misc_feature 1..146: note = Description of Artificial Sequence: Synthetic polynucleotide
  source 1..146: mol_type = other RNA
gacgtacctctttacagtattgttttagagctagaaatagcaagttaaaataaggctagtccgttatcaacttgaaaaagtggcaccgagtcggtgcgtgaacaccccttgggcgtggcagtcaccaaatactgtaaagttttttt

SEQ ID NO: 2202 - RNA, 146 nt, synthetic construct
  misc_feature 1..146: note = Description of Artificial Sequence: Synthetic polynucleotide
  source 1..146: mol_type = other RNA
acgtacctctttacagtattgttttagagctagaaatagcaagttaaaataaggctagtccgttatcaacttgaaaaagtggcaccgagtcggtgcagcagtgaacaccccttgggcgtggcagtcaccaaatactgtaaagaggt

SEQ ID NO: 2203 - RNA, 146 nt, synthetic construct
  misc_feature 1..146: note = Description of Artificial Sequence: Synthetic polynucleotide
  source 1..146: mol_type = other RNA
gacgtacctctttacagtattgttttagagctagaaatagcaagttaaaataaggctagtccgttatcaacttgaaaaagtggcaccgagtcggtgctgaacaccccttgggcgtggcagtcaccaaatactgtaaagattttttt

SEQ ID NO: 2204 - RNA, 146 nt, synthetic construct
  misc_feature 1..146: note = Description of Artificial Sequence: Synthetic polynucleotide
  source 1..146: mol_type = other RNA
gacgtacctctttacagtattgttttagagctagaaatagcaagttaaaataaggctagtccgttatcaacttgaaaaagtggcaccgagtcggtgcgaacaccccttgggcgtggcagtcaccaaatactgtaaagagttttttt

SEQ ID NO: 2205 - RNA, 146 nt, synthetic construct
  misc_feature 1..146: note = Description of Artificial Sequence: Synthetic polynucleotide
  source 1..146: mol_type = other RNA
gacgtacctctttacagtattgttttagagctagaaatagcaagttaaaataaggctagtccgttatcaacttgaaaaagtggcaccgagtcggtgcacaccccttgggcgtggcagtcaccaaatactgtaaagaggtttttttt

SEQ ID NO: 2206 - RNA, 146 nt, synthetic construct
  misc_feature 1..146: note = Description of Artificial Sequence: Synthetic polynucleotide
  source 1..146: mol_type = other RNA
gacgtacctctttacagtattgttttagagctagaaatagcaagttaaaataaggctagtccgttatcaacttgaaaaagtggcaccgagtcggtgcaacaccccttgggcgtggcagtcaccaaatactgtaaagaggttttttt

SEQ ID NO: 2207 - RNA, 147 nt, synthetic construct
  misc_feature 1..147: note = Description of Artificial Sequence: Synthetic polynucleotide
  source 1..147: mol_type = other RNA
acgtacctctttacagtattgttttagagctagaaatagcaagttaaaataaggctagtccgttatcaacttgaaaaagtggcaccgagtcggtgcagcagtgaacaccccttgggcgtggcagtcaccaaatactgtaaagaggta

SEQ ID NO: 2208 - RNA, 147 nt, synthetic construct
  misc_feature 1..147: note = Description of Artificial Sequence: Synthetic polynucleotide
  source 1..147: mol_type = other RNA
acgtacctctttacagtattgttttagagctagaaatagcaagttaaaataaggctagtccgttatcaacttgaaaaagtggcaccgagtcggtgcgccagcagtgaacaccccttgggcgtggcagtcaccaaatactgtaaagag

SEQ ID NO: 2209 - RNA, 147 nt, synthetic construct
  misc_feature 1..147: note = Description of Artificial Sequence: Synthetic polynucleotide
  source 1..147: mol_type = other RNA
gacgtacctctttacagtattgttttagagctagaaatagcaagttaaaataaggctagtccgttatcaacttgaaaaagtggcaccgagtcggtgcgtgaacaccccttgggcgtggcagtcaccaaatactgtaaagattttttt

SEQ ID NO: 2210 - RNA, 147 nt, synthetic construct
  misc_feature 1..147: note = Description of Artificial Sequence: Synthetic polynucleotide
  source 1..147: mol_type = other RNA
gacgtacctctttacagtattgttttagagctagaaatagcaagttaaaataaggctagtccgttatcaacttgaaaaagtggcaccgagtcggtgcagtgaacaccccttgggcgtggcagtcaccaaatactgtaaagttttttt

SEQ ID NO: 2211 - RNA, 147 nt, synthetic construct
  misc_feature 1..147: note = Description of Artificial Sequence: Synthetic polynucleotide
  source 1..147: mol_type = other RNA
gacgtacctctttacagtattgttttagagctagaaatagcaagttaaaataaggctagtccgttatcaacttgaaaaagtggcaccgagtcggtgcgaacaccccttgggcgtggcagtcaccaaatactgtaaagaggttttttt

SEQ ID NO: 2212 - RNA, 147 nt, synthetic construct
  misc_feature 1..147: note = Description of Artificial Sequence: Synthetic polynucleotide
  source 1..147: mol_type = other RNA
gacgtacctctttacagtattgttttagagctagaaatagcaagttaaaataaggctagtccgttatcaacttgaaaaagtggcaccgagtcggtgcgcagtgaacaccccttgggcgtggcagtcaccaaatactgtaattttttt

SEQ ID NO: 2213 - RNA, 147 nt, synthetic construct
  misc_feature 1..147: note = Description of Artificial Sequence: Synthetic polynucleotide
  source 1..147: mol_type = other RNA
gacgtacctctttacagtattgttttagagctagaaatagcaagttaaaataaggctagtccgttatcaacttgaaaaagtggcaccgagtcggtgctgaacaccccttgggcgtggcagtcaccaaatactgtaaagagttttttt

SEQ ID NO: 2214 - RNA, 147 nt, synthetic construct
  misc_feature 1..147: note = Description of Artificial Sequence: Synthetic polynucleotide
  source 1..147: mol_type = other RNA
gacgtacctctttacagtattgttttagagctagaaatagcaagttaaaataaggctagtccgttatcaacttgaaaaagtggcaccgagtcggtgcaacaccccttgggcgtggcagtcaccaaatactgtaaagaggtttttttt

SEQ ID NO: 2215 - RNA, 147 nt, synthetic construct
  misc_feature 1..147: note = Description of Artificial Sequence: Synthetic polynucleotide
  source 1..147: mol_type = other RNA
gacgtacctctttacagtattgttttagagctagaaatagcaagttaaaataaggctagtccgttatcaacttgaaaaagtggcaccgagtcggtgcacaccccttgggcgtggcagtcaccaaatactgtaaagaggtattttttt

SEQ ID NO: 2216 - RNA, 148 nt, synthetic construct
  misc_feature 1..148: note = Description of Artificial Sequence: Synthetic polynucleotide
  source 1..148: mol_type = other RNA
gacgtacctctttacagtattgttttagagctagaaatagcaagttaaaataaggctagtccgttatcaacttgaaaaagtggcaccgagtcggtgcgtgaacaccccttgggcgtggcagtcaccaaatactgtaaagagttttttt

SEQ ID NO: 2217 - RNA, 148 nt, synthetic construct
  misc_feature 1..148: note = Description of Artificial Sequence: Synthetic polynucleotide
  source 1..148: mol_type = other RNA
gacgtacctctttacagtattgttttagagctagaaatagcaagttaaaataaggctagtccgttatcaacttgaaaaagtggcaccgagtcggtgctgaacaccccttgggcgtggcagtcaccaaatactgtaaagaggttttttt

SEQ ID NO: 2218 - RNA, 148 nt, synthetic construct
  misc_feature 1..148: note = Description of Artificial Sequence: Synthetic polynucleotide
  source 1..148: mol_type = other RNA
gacgtacctctttacagtattgttttagagctagaaatagcaagttaaaataaggctagtccgttatcaacttgaaaaagtggcaccgagtcggtgcagcagtgaacaccccttgggcgtggcagtcaccaaatactgtaattttttt

SEQ ID NO: 2219 - RNA, 148 nt, synthetic construct
  misc_feature 1..148: note = Description of Artificial Sequence: Synthetic polynucleotide
  source 1..148: mol_type = other RNA
gacgtacctctttacagtattgttttagagctagaaatagcaagttaaaataaggctagtccgttatcaacttgaaaaagtggcaccgagtcggtgcagtgaacaccccttgggcgtggcagtcaccaaatactgtaaagattttttt

SEQ ID NO: 2220 - RNA, 148 nt, synthetic construct
  misc_feature 1..148: note = Description of Artificial Sequence: Synthetic polynucleotide
  source 1..148: mol_type = other RNA
acgtacctctttacagtattgttttagagctagaaatagcaagttaaaataaggctagtccgttatcaacttgaaaaagtggcaccgagtcggtgcgccagcagtgaacaccccttgggcgtggcagtcaccaaatactgtaaagagg

SEQ ID NO: 2221 - RNA, 148 nt, synthetic construct
  misc_feature 1..148: note = Description of Artificial Sequence: Synthetic polynucleotide
  source 1..148: mol_type = other RNA
gacgtacctctttacagtattgttttagagctagaaatagcaagttaaaataaggctagtccgttatcaacttgaaaaagtggcaccgagtcggtgcaacaccccttgggcgtggcagtcaccaaatactgtaaagaggtattttttt

SEQ ID NO: 2222 - RNA, 148 nt, synthetic construct
  misc_feature 1..148: note = Description of Artificial Sequence: Synthetic polynucleotide
  source 1..148: mol_type = other RNA
gacgtacctctttacagtattgttttagagctagaaatagcaagttaaaataaggctagtccgttatcaacttgaaaaagtggcaccgagtcggtgcgcagtgaacaccccttgggcgtggcagtcaccaaatactgtaaattttttt

SEQ ID NO: 2223 - RNA, 148 nt, synthetic construct
  misc_feature 1..148: note = Description of Artificial Sequence: Synthetic polynucleotide
  source 1..148: mol_type = other RNA
gacgtacctctttacagtattgttttagagctagaaatagcaagttaaaataaggctagtccgttatcaacttgaaaaagtggcaccgagtcggtgcgaacaccccttgggcgtggcagtcaccaaatactgtaaagaggtttttttt

SEQ ID NO: 2224 - RNA, 149 nt, synthetic construct
  misc_feature 1..149: note = Description of Artificial Sequence: Synthetic polynucleotide
  source 1..149: mol_type = other RNA
gacgtacctctttacagtattgttttagagctagaaatagcaagttaaaataaggctagtccgttatcaacttgaaaaagtggcaccgagtcggtgcgtgaacaccccttgggcgtggcagtcaccaaatactgtaaagaggttttttt

SEQ ID NO: 2225 - RNA, 149 nt, synthetic construct
  misc_feature 1..149: note = Description of Artificial Sequence: Synthetic polynucleotide
  source 1..149: mol_type = other RNA
gacgtacctctttacagtattgttttagagctagaaatagcaagttaaaataaggctagtccgttatcaacttgaaaaagtggcaccgagtcggtgcgcagtgaacaccccttgggcgtggcagtcaccaaatactgtaaagttttttt

SEQ ID NO: 2226 - RNA, 149 nt, synthetic construct
  misc_feature 1..149: note = Description of Artificial Sequence: Synthetic polynucleotide
  source 1..149: mol_type = other RNA
acgtacctctttacagtattgttttagagctagaaatagcaagttaaaataaggctagtccgttatcaacttgaaaaagtggcaccgagtcggtgcgccagcagtgaacaccccttgggcgtggcagtcaccaaatactgtaaagaggt

SEQ ID NO: 2227 - RNA, 149 nt, synthetic construct
  misc_feature 1..149: note = Description of Artificial Sequence: Synthetic polynucleotide
  source 1..149: mol_type = other RNA
gacgtacctctttacagtattgttttagagctagaaatagcaagttaaaataaggctagtccgttatcaacttgaaaaagtggcaccgagtcggtgctgaacaccccttgggcgtggcagtcaccaaatactgtaaagaggtttttttt

SEQ ID NO: 2228 - RNA, 149 nt, synthetic construct
  misc_feature 1..149: note = Description of Artificial Sequence: Synthetic polynucleotide
  source 1..149: mol_type = other RNA
gacgtacctctttacagtattgttttagagctagaaatagcaagttaaaataaggctagtccgttatcaacttgaaaaagtggcaccgagtcggtgcgaacaccccttgggcgtggcagtcaccaaatactgtaaagaggtattttttt

SEQ ID NO: 2229 - RNA, 149 nt, synthetic construct
  misc_feature 1..149: note = Description of Artificial Sequence: Synthetic polynucleotide
  source 1..149: mol_type = other RNA
gacgtacctctttacagtattgttttagagctagaaatagcaagttaaaataaggctagtccgttatcaacttgaaaaagtggcaccgagtcggtgcagtgaacaccccttgggcgtggcagtcaccaaatactgtaaagagttttttt

SEQ ID NO: 2230 - RNA, 149 nt, synthetic construct
  misc_feature 1..149: note = Description of Artificial Sequence: Synthetic polynucleotide
  source 1..149: mol_type = other RNA
gacgtacctctttacagtattgttttagagctagaaatagcaagttaaaataaggctagtccgttatcaacttgaaaaagtggcaccgagtcggtgcagcagtgaacaccccttgggcgtggcagtcaccaaatactgtaaattttttt

SEQ ID NO: 2231 - RNA, 150 nt, synthetic construct
  misc_feature 1..150: note = Description of Artificial Sequence: Synthetic polynucleotide
  source 1..150: mol_type = other RNA
gacgtacctctttacagtattgttttagagctagaaatagcaagttaaaataaggctagtccgttatcaacttgaaaaagtggcaccgagtcggtgcagcagtgaacaccccttgggcgtggcagtcaccaaatactgtaaagttttttt

SEQ ID NO: 2232 - RNA, 150 nt, synthetic construct
  misc_feature 1..150: note = Description of Artificial Sequence: Synthetic polynucleotide
  source 1..150: mol_type = other RNA
acgtacctctttacagtattgttttagagctagaaatagcaagttaaaataaggctagtccgttatcaacttgaaaaagtggcaccgagtcggtgcgccagcagtgaacaccccttgggcgtggcagtcaccaaatactgtaaagaggta

SEQ ID NO: 2233 - RNA, 150 nt, synthetic construct
  misc_feature 1..150: note = Description of Artificial Sequence: Synthetic polynucleotide
  source 1..150: mol_type = other RNA
gacgtacctctttacagtattgttttagagctagaaatagcaagttaaaataaggctagtccgttatcaacttgaaaaagtggcaccgagtcggtgctgaacaccccttgggcgtggcagtcaccaaatactgtaaagaggtattttttt

SEQ ID NO: 2234 - RNA, 150 nt, synthetic construct
  misc_feature 1..150: note = Description of Artificial Sequence: Synthetic polynucleotide
  source 1..150: mol_type = other RNA
gacgtacctctttacagtattgttttagagctagaaatagcaagttaaaataaggctagtccgttatcaacttgaaaaagtggcaccgagtcggtgcgcagtgaacaccccttgggcgtggcagtcaccaaatactgtaaagattttttt

SEQ ID NO: 2235 - RNA, 150 nt, synthetic construct
  misc_feature 1..150: note = Description of Artificial Sequence: Synthetic polynucleotide
  source 1..150: mol_type = other RNA
gacgtacctctttacagtattgttttagagctagaaatagcaagttaaaataaggctagtccgttatcaacttgaaaaagtggcaccgagtcggtgcagtgaacaccccttgggcgtggcagtcaccaaatactgtaaagaggttttttt

SEQ ID NO: 2236 - RNA, 150 nt, synthetic construct
  misc_feature 1..150: note = Description of Artificial Sequence: Synthetic polynucleotide
  source 1..150: mol_type = other RNA
gacgtacctctttacagtattgttttagagctagaaatagcaagttaaaataaggctagtccgttatcaacttgaaaaagtggcaccgagtcggtgcgtgaacaccccttgggcgtggcagtcaccaaatactgtaaagaggtttttttt

SEQ ID NO: 2237 - RNA, 151 nt, synthetic construct
  misc_feature 1..151: note = Description of Artificial Sequence: Synthetic polynucleotide
  source 1..151: mol_type = other RNA
gacgtacctctttacagtattgttttagagctagaaatagcaagttaaaataaggctagtccgttatcaacttgaaaaagtggcaccgagtcggtgcgcagtgaacaccccttgggcgtggcagtcaccaaatactgtaaagagttttttt

SEQ ID NO: 2238 - RNA, 151 nt, synthetic construct
  misc_feature 1..151: note = Description of Artificial Sequence: Synthetic polynucleotide
  source 1..151: mol_type = other RNA
gacgtacctctttacagtattgttttagagctagaaatagcaagttaaaataaggctagtccgttatcaacttgaaaaagtggcaccgagtcggtgcgtgaacaccccttgggcgtggcagtcaccaaatactgtaaagaggtattttttt

SEQ ID NO: 2239 - RNA, 151 nt, synthetic construct
  misc_feature 1..151: note = Description of Artificial Sequence: Synthetic polynucleotide
  source 1..151: mol_type = other RNA
gacgtacctctttacagtattgttttagagctagaaatagcaagttaaaataaggctagtccgttatcaacttgaaaaagtggcaccgagtcggtgcgccagcagtgaacaccccttgggcgtggcagtcaccaaatactgtaattttttt

SEQ ID NO: 2240 - RNA, 151 nt, synthetic construct
  misc_feature 1..151: note = Description of Artificial Sequence: Synthetic polynucleotide
  source 1..151: mol_type = other RNA
gacgtacctctttacagtattgttttagagctagaaatagcaagttaaaataaggctagtccgttatcaacttgaaaaagtggcaccgagtcggtgcagcagtgaacaccccttgggcgtggcagtcaccaaatactgtaaagattttttt

SEQ ID NO: 2241 - RNA, 151 nt, synthetic construct
  misc_feature 1..151: note = Description of Artificial Sequence: Synthetic polynucleotide
  source 1..151: mol_type = other RNA
gacgtacctctttacagtattgttttagagctagaaatagcaagttaaaataaggctagtccgttatcaacttgaaaaagtggcaccgagtcggtgcagtgaacaccccttgggcgtggcagtcaccaaatactgtaaagaggtttttttt

SEQ ID NO: 2242 - RNA, 152 nt, synthetic construct
  misc_feature 1..152: note = Description of Artificial Sequence: Synthetic polynucleotide
  source 1..152: mol_type = other RNA
gacgtacctctttacagtattgttttagagctagaaatagcaagttaaaataaggctagtccgttatcaacttgaaaaagtggcaccgagtcggtgcagcagtgaacaccccttgggcgtggcagtcaccaaatactgtaaagagttttttt

SEQ ID NO: 2243 - RNA, 152 nt, synthetic construct
  misc_feature 1..152: note = Description of Artificial Sequence: Synthetic polynucleotide
  source 1..152: mol_type = other RNA
gacgtacctctttacagtattgttttagagctagaaatagcaagttaaaataaggctagtccgttatcaacttgaaaaagtggcaccgagtcggtgcagtgaacaccccttgggcgtggcagtcaccaaatactgtaaagaggtattttttt

SEQ ID NO: 2244 - RNA, 152 nt, synthetic construct
  misc_feature 1..152: note = Description of Artificial Sequence: Synthetic polynucleotide
  source 1..152: mol_type = other RNA
gacgtacctctttacagtattgttttagagctagaaatagcaagttaaaataaggctagtccgttatcaacttgaaaaagtggcaccgagtcggtgcgccagcagtgaacaccccttgggcgtggcagtcaccaaatactgtaaattttttt

SEQ ID NO: 2245 - RNA, 152 nt, synthetic construct
  misc_feature 1..152: note = Description of Artificial Sequence: Synthetic polynucleotide
  source 1..152: mol_type = other RNA
gacgtacctctttacagtattgttttagagctagaaatagcaagttaaaataaggctagtccgttatcaacttgaaaaagtggcaccgagtcggtgcgcagtgaacaccccttgggcgtggcagtcaccaaatactgtaaagaggttttttt

SEQ ID NO: 2246 - RNA, 153 nt, synthetic construct
  misc_feature 1..153: note = Description of Artificial Sequence: Synthetic polynucleotide
  source 1..153: mol_type = other RNA
gacgtacctctttacagtattgttttagagctagaaatagcaagttaaaataaggctagtccgttatcaacttgaaaaagtggcaccgagtcggtgcagcagtgaacaccccttgggcgtggcagtcaccaaatactgtaaagaggttttttt

SEQ ID NO: 2247 - RNA, 153 nt, synthetic construct
  misc_feature 1..153: note = Description of Artificial Sequence: Synthetic polynucleotide
  source 1..153: mol_type = other RNA
gacgtacctctttacagtattgttttagagctagaaatagcaagttaaaataaggctagtccgttatcaacttgaaaaagtggcaccgagtcggtgcgcagtgaacaccccttgggcgtggcagtcaccaaatactgtaaagaggtttttttt

SEQ ID NO: 2248 - RNA, 153 nt, synthetic construct
  misc_feature 1..153: note = Description of Artificial Sequence: Synthetic polynucleotide
  source 1..153: mol_type = other RNA
gacgtacctctttacagtattgttttagagctagaaatagcaagttaaaataaggctagtccgttatcaacttgaaaaagtggcaccgagtcggtgcgccagcagtgaacaccccttgggcgtggcagtcaccaaatactgtaaagttttttt

SEQ ID NO: 2249 - RNA, 154 nt, synthetic construct
  misc_feature 1..154: note = Description of Artificial Sequence: Synthetic polynucleotide
  source 1..154: mol_type = other RNA
gacgtacctctttacagtattgttttagagctagaaatagcaagttaaaataaggctagtccgttatcaacttgaaaaagtggcaccgagtcggtgcgcagtgaacaccccttgggcgtggcagtcaccaaatactgtaaagaggtattttttt

SEQ ID NO: 2250 - RNA, 154 nt, synthetic construct
  misc_feature 1..154: note = Description of Artificial Sequence: Synthetic polynucleotide
  source 1..154: mol_type = other RNA
gacgtacctctttacagtattgttttagagctagaaatagcaagttaaaataaggctagtccgttatcaacttgaaaaagtggcaccgagtcggtgcgccagcagtgaacaccccttgggcgtggcagtcaccaaatactgtaaagattttttt

SEQ ID NO: 2251 - RNA, 154 nt, synthetic construct
  misc_feature 1..154: note = Description of Artificial Sequence: Synthetic polynucleotide
  source 1..154: mol_type = other RNA
gacgtacctctttacagtattgttttagagctagaaatagcaagttaaaataaggctagtccgttatcaacttgaaaaagtggcaccgagtcggtgcagcagtgaacaccccttgggcgtggcagtcaccaaatactgtaaagaggtttttttt

SEQ ID NO: 2252 - RNA, 155 nt, synthetic construct
  misc_feature 1..155: note = Description of Artificial Sequence: Synthetic polynucleotide
  source 1..155: mol_type = other RNA
gacgtacctctttacagtattgttttagagctagaaatagcaagttaaaataaggctagtccgttatcaacttgaaaaagtggcaccgagtcggtgcgccagcagtgaacaccccttgggcgtggcagtcaccaaatactgtaaagagttttttt

SEQ ID NO: 2253 - RNA, 155 nt, synthetic construct
  misc_feature 1..155: note = Description of Artificial Sequence: Synthetic polynucleotide
  source 1..155: mol_type = other RNA
gacgtacctctttacagtattgttttagagctagaaatagcaagttaaaataaggctagtccgttatcaacttgaaaaagtggcaccgagtcggtgcagcagtgaacaccccttgggcgtggcagtcaccaaatactgtaaagaggtattttttt

SEQ ID NO: 2254 - RNA, 156 nt, synthetic construct
  misc_feature 1..156: note = Description of Artificial Sequence: Synthetic polynucleotide
  source 1..156: mol_type = other RNA
gacgtacctctttacagtattgttttagagctagaaatagcaagttaaaataaggctagtccgttatcaacttgaaaaagtggcaccgagtcggtgcgccagcagtgaacaccccttgggcgtggcagtcaccaaatactgtaaagaggttttttt

SEQ ID NO: 2255 - RNA, 157 nt, synthetic construct
  misc_feature 1..157: note = Description of Artificial Sequence: Synthetic polynucleotide
  source 1..157: mol_type = other RNA
gacgtacctctttacagtattgttttagagctagaaatagcaagttaaaataaggctagtccgttatcaacttgaaaaagtggcaccgagtcggtgcgccagcagtgaacaccccttgggcgtggcagtcaccaaatactgtaaagaggtttttttt

SEQ ID NO: 2256 - RNA, 158 nt, synthetic construct
  misc_feature 1..158: note = Description of Artificial Sequence: Synthetic polynucleotide
  source 1..158: mol_type = other RNA
gacgtacctctttacagtattgttttagagctagaaatagcaagttaaaataaggctagtccgttatcaacttgaaaaagtggcaccgagtcggtgcgccagcagtgaacaccccttgggcgtggcagtcaccaaatactgtaaagaggtattttttt

SEQ ID NO: 2257 - RNA, 96 nt, synthetic construct
  misc_feature 1..96: note = Description of Artificial Sequence: Synthetic oligonucleotide
  source 1..96: mol_type = other RNA
cagtgaacaccccttgggcggttttagagctagaaatagcaagttaaaataaggctagtccgttatcaacttgaaaaagtggcaccgagtcggtgc

SEQ ID NO: 2258 - RNA, 96 nt, synthetic construct
  misc_feature 1..96: note = Description of Artificial Sequence: Synthetic oligonucleotide
  source 1..96: mol_type = other RNA
actgcccctcaggaaggttcgttttagagctagaaatagcaagttaaaataaggctagtccgttatcaacttgaaaaagtggcaccgagtcggtgc

SEQ ID NO: 2259 - RNA, 96 nt, synthetic construct
  misc_feature 1..96: note = Description of Artificial Sequence: Synthetic oligonucleotide
  source 1..96: mol_type = other RNA
agtcaccaaatactgtaaaggttttagagctagaaatagcaagttaaaataaggctagtccgttatcaacttgaaaaagtggcaccgagtcggtgc

SEQ ID NO: 2260 - RNA, 96 nt, synthetic construct
  misc_feature 1..96: note = Description of Artificial Sequence: Synthetic oligonucleotide
  source 1..96: mol_type = other RNA
tcatgcgggtgctcctgctggttttagagctagaaatagcaagttaaaataaggctagtccgttatcaacttgaaaaagtggcaccgagtcggtgc

SEQ ID NO: 2261 - RNA, 96 nt, synthetic construct
  misc_feature 1..96: note = Description of Artificial Sequence: Synthetic oligonucleotide
  source 1..96: mol_type = other RNA
aggaaggttctggctgtggtgttttagagctagaaatagcaagttaaaataaggctagtccgttatcaacttgaaaaagtggcaccgagtcggtgc

SEQ ID NO: 2262 - RNA, 96 nt, synthetic construct
  misc_feature 1..96: note = Description of Artificial Sequence: Synthetic oligonucleotide
  source 1..96: mol_type = other RNA
atgtggccacactgcccctcgttttagagctagaaatagcaagttaaaataaggctagtccgttatcaacttgaaaaagtggcaccgagtcggtgc

SEQ ID NO: 2263 - RNA, 96 nt, synthetic construct
  misc_feature 1..96: note = Description of Artificial Sequence: Synthetic oligonucleotide
  source 1..96: mol_type = other RNA
gaggtacgtggacttgggcggttttagagctagaaatagcaagttaaaataaggctagtccgttatcaacttgaaaaagtggcaccgagtcggtgc

SEQ ID NO: 2264 - RNA, 96 nt, synthetic construct
  misc_feature 1..96: note = Description of Artificial Sequence: Synthetic oligonucleotide
  source 1..96: mol_type = other RNA
ggccagcagtgaacacccctgttttagagctagaaatagcaagttaaaataaggctagtccgttatcaacttgaaaaagtggcaccgagtcggtgc

SEQ ID NO: 2265 - RNA, 96 nt, synthetic construct
  misc_feature 1..96: note = Description of Artificial Sequence: Synthetic oligonucleotide
  source 1..96: mol_type = other RNA
catgcgggtgctcctgctgggttttagagctagaaatagcaagttaaaataaggctagtccgttatcaacttgaaaaagtggcaccgagtcggtgc

SEQ ID NO: 2266 - RNA, 96 nt, synthetic construct
  misc_feature 1..96: note = Description of Artificial Sequence: Synthetic oligonucleotide
  source 1..96: mol_type = other RNA
gtaaagaggtacgtggacttgttttagagctagaaatagcaagttaaaataaggctagtccgttatcaacttgaaaaagtggcaccgagtcggtgc

SEQ ID NO: 2267 - RNA, 96 nt, synthetic construct
  misc_feature 1..96: note = Description of Artificial Sequence: Synthetic oligonucleotide
  source 1..96: mol_type = other RNA
ggtgctcctgctgggggatggttttagagctagaaatagcaagttaaaataaggctagtccgttatcaacttgaaaaagtggcaccgagtcggtgc

SEQ ID NO: 2268 - RNA, 96 nt, synthetic construct
  misc_feature 1..96: note = Description of Artificial Sequence: Synthetic oligonucleotide
  source 1..96: mol_type = other RNA
gccagcagtgaacaccccttgttttagagctagaaatagcaagttaaaataaggctagtccgttatcaacttgaaaaagtggcaccgagtcggtgc

SEQ ID NO: 2269 - RNA, 96 nt, synthetic construct
  misc_feature 1..96: note = Description of Artificial Sequence: Synthetic oligonucleotide
  source 1..96: mol_type = other RNA
cctcaggaaggttctggctggttttagagctagaaatagcaagttaaaataaggctagtccgttatcaacttgaaaaagtggcaccgagtcggtgc

SEQ ID NO: 2270 - RNA, 96 nt, synthetic construct
  misc_feature 1..96: note = Description of Artificial Sequence: Synthetic oligonucleotide
  source 1..96: mol_type = other RNA
ggccacactgcccctcaggagttttagagctagaaatagcaagttaaaataaggctagtccgttatcaacttgaaaaagtggcaccgagtcggtgc

SEQ ID NO: 2271 - RNA, 96 nt, synthetic construct
  misc_feature 1..96: note = Description of Artificial Sequence: Synthetic oligonucleotide
  source 1..96: mol_type = other RNA
ggaaggttctggctgtggtggttttagagctagaaatagcaagttaaaataaggctagtccgttatcaacttgaaaaagtggcaccgagtcggtgc

SEQ ID NO: 2272 - RNA, 96 nt, synthetic construct
  misc_feature 1..96: note = Description of Artificial Sequence: Synthetic oligonucleotide
  source 1..96: mol_type = other RNA
gtcatgcgggtgctcctgctgttttagagctagaaatagcaagttaaaataaggctagtccgttatcaacttgaaaaagtggcaccgagtcggtgc

SEQ ID NO: 2273 - RNA, 96 nt, synthetic construct
  misc_feature 1..96: note = Description of Artificial Sequence: Synthetic oligonucleotide
  source 1..96: mol_type = other RNA
tctggctgtggtggggactggttttagagctagaaatagcaagttaaaataaggctagtccgttatcaacttgaaaaagtggcaccgagtcggtgc

SEQ ID NO: 2274 - RNA, 96 nt, synthetic construct
  misc_feature 1..96: note = Description of Artificial Sequence: Synthetic oligonucleotide
  source 1..96: mol_type = other RNA
caggaaggttctggctgtgggttttagagctagaaatagcaagttaaaataaggctagtccgttatcaacttgaaaaagtggcaccgagtcggtgc

SEQ ID NO: 2275 - RNA, 96 nt, synthetic construct
  misc_feature 1..96: note = Description of Artificial Sequence: Synthetic oligonucleotide
  source 1..96: mol_type = other RNA
ggctgtggtggggactgcgggttttagagctagaaatagcaagttaaaataaggctagtccgttatcaacttgaaaaagtggcaccgagtcggtgc

SEQ ID NO: 2276 - RNA, 96 nt, synthetic construct
  misc_feature 1..96: note = Description of Artificial Sequence: Synthetic oligonucleotide
  source 1..96: mol_type = other RNA
tgtaaagaggtacgtggactgttttagagctagaaatagcaagttaaaataaggctagtccgttatcaacttgaaaaagtggcaccgagtcggtgc

SEQ ID NO: 2277 - RNA, 96 nt, synthetic construct
  misc_feature 1..96: note = Description of Artificial Sequence: Synthetic oligonucleotide
  source 1..96: mol_type = other RNA
aaatactgtaaagaggtacggttttagagctagaaatagcaagttaaaataaggctagtccgttatcaacttgaaaaagtggcaccgagtcggtgc

SEQ ID NO: 2278 - RNA, 97 nt, synthetic construct
  misc_feature 1..97: note = Description of Artificial Sequence: Synthetic oligonucleotide
  source 1..97: mol_type = other RNA
gtcatgcgggtgctcctgctggttttagagctagaaatagcaagttaaaataaggctagtccgttatcaacttgaaaaagtggcaccgagtcggtgc

SEQ ID NO: 2279 - RNA, 97 nt, synthetic construct
  misc_feature 1..97: note = Description of Artificial Sequence: Synthetic oligonucleotide
  source 1..97: mol_type = other RNA
gaaatactgtaaagaggtacggttttagagctagaaatagcaagttaaaataaggctagtccgttatcaacttgaaaaagtggcaccgagtcggtgc

SEQ ID NO: 2280 - RNA, 97 nt, synthetic construct
  misc_feature 1..97: note = Description of Artificial Sequence: Synthetic oligonucleotide
  source 1..97: mol_type = other RNA
gaggaaggttctggctgtggtgttttagagctagaaatagcaagttaaaataaggctagtccgttatcaacttgaaaaagtggcaccgagtcggtgc

SEQ ID NO: 2281 - RNA, 97 nt, synthetic construct
  misc_feature 1..97: note = Description of Artificial Sequence: Synthetic oligonucleotide
  source 1..97: mol_type = other RNA
gcatgcgggtgctcctgctgggttttagagctagaaatagcaagttaaaataaggctagtccgttatcaacttgaaaaagtggcaccgagtcggtgc

SEQ ID NO: 2282 - RNA, 97 nt, synthetic construct
  misc_feature 1..97: note = Description of Artificial Sequence: Synthetic oligonucleotide
  source 1..97: mol_type = other RNA
gatgtggccacactgcccctcgttttagagctagaaatagcaagttaaaataaggctagtccgttatcaacttgaaaaagtggcaccgagtcggtgc

SEQ ID NO: 2283 - RNA, 97 nt, synthetic construct
  misc_feature 1..97: note = Description of Artificial Sequence: Synthetic oligonucleotide
  source 1..97: mol_type = other RNA
gcaggaaggttctggctgtgggttttagagctagaaatagcaagttaaaataaggctagtccgttatcaacttgaaaaagtggcaccgagtcggtgc

SEQ ID NO: 2284 - RNA, 97 nt, synthetic construct
  misc_feature 1..97: note = Description of Artificial Sequence: Synthetic oligonucleotide
  source 1..97: mol_type = other RNA
gtgtaaagaggtacgtggactgttttagagctagaaatagcaagttaaaataaggctagtccgttatcaacttgaaaaagtggcaccgagtcggtgc

SEQ ID NO: 2285 - RNA, 97 nt, synthetic construct
  misc_feature 1..97: note = Description of Artificial Sequence: Synthetic oligonucleotide
  source 1..97: mol_type = other RNA
gcagtgaacaccccttgggcggttttagagctagaaatagcaagttaaaataaggctagtccgttatcaacttgaaaaagtggcaccgagtcggtgc

SEQ ID NO: 2286 - RNA, 97 nt, synthetic construct
  misc_feature 1..97: note = Description of Artificial Sequence: Synthetic oligonucleotide
  source 1..97: mol_type = other RNA
gtctggctgtggtggggactggttttagagctagaaatagcaagttaaaataaggctagtccgttatcaacttgaaaaagtggcaccgagtcggtgc

SEQ ID NO: 2287 - RNA, 97 nt, synthetic construct
  misc_feature 1..97: note = Description of Artificial Sequence: Synthetic oligonucleotide
  source 1..97: mol_type = other RNA
gcctcaggaaggttctggctggttttagagctagaaatagcaagttaaaataaggctagtccgttatcaacttgaaaaagtggcaccgagtcggtgc

SEQ ID NO: 2288 - RNA, 97 nt, synthetic construct
  misc_feature 1..97: note = Description of Artificial Sequence: Synthetic oligonucleotide
  source 1..97: mol_type = other RNA
gagtcaccaaatactgtaaaggttttagagctagaaatagcaagttaaaataaggctagtccgttatcaacttgaaaaagtggcaccgagtcggtgc

SEQ ID NO: 2289 - RNA, 97 nt, synthetic construct
  misc_feature 1..97: note = Description of Artificial Sequence: Synthetic oligonucleotide
  source 1..97: mol_type = other RNA
gactgcccctcaggaaggttcgttttagagctagaaatagcaagttaaaataaggctagtccgttatcaacttgaaaaagtggcaccgagtcggtgc

SEQ ID NO: 2290 - RNA, 100 nt, synthetic construct
  misc_feature 1..100: note = Description of Artificial Sequence: Synthetic polynucleotide
  source 1..100: mol_type = other RNA
catgcgggtgctcctgctgggttttagagctagaaatagcaagttaaaataaggctagtccgttatcaacttgaaaaagtggcaccgagtcggtgctttt

SEQ ID NO: 2291 - RNA, 100 nt, synthetic construct
  misc_feature 1..100: note = Description of Artificial Sequence: Synthetic polynucleotide
  source 1..100: mol_type = other RNA
gccagcagtgaacaccccttgttttagagctagaaatagcaagttaaaataaggctagtccgttatcaacttgaaaaagtggcaccgagtcggtgctttt

SEQ ID NO: 2292 - RNA, 100 nt, synthetic construct
  misc_feature 1..100: note = Description of Artificial Sequence: Synthetic polynucleotide
  source 1..100: mol_type = other RNA
ggccagcagtgaacacccctgttttagagctagaaatagcaagttaaaataaggctagtccgttatcaacttgaaaaagtggcaccgagtcggtgctttt

SEQ ID NO: 2293 - RNA, 20 nt, synthetic construct
  misc_feature 1..20: note = Description of Artificial Sequence: Synthetic oligonucleotide
  source 1..20: mol_type = other RNA
tttggtgactgccacgccca

SEQ ID NO: 2294-2296 - skipped (3 entries)

SEQ ID NO: 2297 - RNA, 10 nt, synthetic construct
  misc_feature 1..10: note = Description of Artificial Sequence: Synthetic oligonucleotide
  source 1..10: mol_type = other RNA
gcgtggcagt

SEQ ID NO: 2298 - RNA, 11 nt, synthetic construct
  misc_feature 1..11: note = Description of Artificial Sequence: Synthetic oligonucleotide
  source 1..11: mol_type = other RNA
gcgtggcagtc

SEQ ID NO: 2299 - RNA, 12 nt, synthetic construct
  misc_feature 1..12: note = Description of Artificial Sequence: Synthetic oligonucleotide
  source 1..12: mol_type = other RNA
gcgtggcagtca

SEQ ID NO: 2300 - RNA, 13 nt, synthetic construct
  misc_feature 1..13: note = Description of Artificial Sequence: Synthetic oligonucleotide
  source 1..13: mol_type = other RNA
gcgtggcagtcac

SEQ ID NO: 2301 - RNA, 14 nt, synthetic construct
  misc_feature 1..14: note = Description of Artificial Sequence: Synthetic oligonucleotide
  source 1..14: mol_type = other RNA
gcgtggcagtcacc

SEQ ID NO: 2302 - RNA, 15 nt, synthetic construct
  misc_feature 1..15: note = Description of Artificial Sequence: Synthetic oligonucleotide
  source 1..15: mol_type = other RNA
gcgtggcagtcacca

SEQ ID NO: 2303 - RNA, 16 nt, synthetic construct
  misc_feature 1..16: note = Description of Artificial Sequence: Synthetic oligonucleotide
  source 1..16: mol_type = other RNA
gcgtggcagtcaccaa

SEQ ID NO: 2304 - RNA, 17 nt, synthetic construct
  misc_feature 1..17: note = Description of Artificial Sequence: Synthetic oligonucleotide
  source 1..17: mol_type = other RNA
gcgtggcagtcaccaaa

SEQ ID NO: 2305 - RNA, 11 nt, synthetic construct
  misc_feature 1..11: note = Description of Artificial Sequence: Synthetic oligonucleotide
  source 1..11: mol_type = other RNA
acatcccttgg

SEQ ID NO: 2306 - RNA, 11 nt, synthetic construct
  misc_feature 1..11: note = Description of Artificial Sequence: Synthetic oligonucleotide
  source 1..11: mol_type = other RNA
acacccattgg

SEQ ID NO: 2307 - RNA, 11 nt, synthetic construct
  misc_feature 1..11: note = Description of Artificial Sequence: Synthetic oligonucleotide
  source 1..11: mol_type = other RNA
acaccccttgg

SEQ ID NO: 2308 - RNA, 11 nt, synthetic construct
  misc_feature 1..11: note = Description of Artificial Sequence: Synthetic oligonucleotide
  source 1..11: mol_type = other RNA
acaccctttgg

SEQ ID NO: 2309 - RNA, 11 nt, synthetic construct
  misc_feature 1..11: note = Description of Artificial Sequence: Synthetic oligonucleotide
  source 1..11: mol_type = other RNA
acatccgttgg

SEQ ID NO: 2310 - RNA, 11 nt, synthetic construct
  misc_feature 1..11: note = Description of Artificial Sequence: Synthetic oligonucleotide
  source 1..11: mol_type = other RNA
acacccgttgg

SEQ ID NO: 2311 - RNA, 12 nt, synthetic construct
  misc_feature 1..12: note = Description of Artificial Sequence: Synthetic oligonucleotide
  source 1..12: mol_type = other RNA
aacacccgttgg

SEQ ID NO: 2312 - RNA, 12 nt, synthetic construct
  misc_feature 1..12: note = Description of Artificial Sequence: Synthetic oligonucleotide
  source 1..12: mol_type = other RNA
aacaccctttgg

SEQ ID NO: 2313 - RNA, 12 nt, synthetic construct
  misc_feature 1..12: note = Description of Artificial Sequence: Synthetic oligonucleotide
  source 1..12: mol_type = other RNA
aacaccccttgg

SEQ ID NO: 2314 - RNA, 12 nt, synthetic construct
  misc_feature 1..12: note = Description of Artificial Sequence: Synthetic oligonucleotide
  source 1..12: mol_type = other RNA
aacatccgttgg

SEQ ID NO: 2315 - RNA, 12 nt, synthetic construct
  misc_feature 1..12: note = Description of Artificial Sequence: Synthetic oligonucleotide
  source 1..12: mol_type = other RNA
aacatcccttgg

SEQ ID NO: 2316 - RNA, 12 nt, synthetic construct
  misc_feature 1..12: note = Description of Artificial Sequence: Synthetic oligonucleotide
  source 1..12: mol_type = other RNA
aacacccattgg

SEQ ID NO: 2317 - RNA, 13 nt, synthetic construct
  misc_feature 1..13: note = Description of Artificial Sequence: Synthetic oligonucleotide
  source 1..13: mol_type = other RNA
gaacatcccttgg

SEQ ID NO: 2318 - RNA, 13 nt, synthetic construct
  misc_feature 1..13: note = Description of Artificial Sequence: Synthetic oligonucleotide
  source 1..13: mol_type = other RNA
gaacaccctttgg

SEQ ID NO: 2319 - RNA, 13 nt, synthetic construct
  misc_feature 1..13: note = Description of Artificial Sequence: Synthetic oligonucleotide
  source 1..13: mol_type = other RNA
gaacacccattgg

SEQ ID NO: 2320 - RNA, 13 nt, synthetic construct
  misc_feature 1..13: note = Description of Artificial Sequence: Synthetic oligonucleotide
  source 1..13: mol_type = other RNA
gaacaccccttgg

SEQ ID NO: 2321 - RNA, 13 nt, synthetic construct
  misc_feature 1..13: note = Description of Artificial Sequence: Synthetic oligonucleotide
  source 1..13: mol_type = other RNA
gaacacccgttgg

SEQ ID NO: 2322 - RNA, 13 nt, synthetic construct
  misc_feature 1..13: note = Description of Artificial Sequence: Synthetic oligonucleotide
  source 1..13: mol_type = other RNA
gaacatccgttgg

SEQ ID NO: 2323 - RNA, 14 nt, synthetic construct
  misc_feature 1..14: note = Description of Artificial Sequence: Synthetic oligonucleotide
  source 1..14: mol_type = other RNA
tgaacatcccttgg

SEQ ID NO: 2324 - RNA, 14 nt, synthetic construct
  misc_feature 1..14: note = Description of Artificial Sequence: Synthetic oligonucleotide
  source 1..14: mol_type = other RNA
tgaacaccctttgg

SEQ ID NO: 2325 - RNA, 14 nt, synthetic construct
  misc_feature 1..14: note = Description of Artificial Sequence: Synthetic oligonucleotide
  source 1..14: mol_type = other RNA
tgaacacccattgg

SEQ ID NO: 2326 - RNA, 14 nt, synthetic construct
  misc_feature 1..14: note = Description of Artificial Sequence: Synthetic oligonucleotide
  source 1..14: mol_type = other RNA
tgaacaccccttgg

SEQ ID NO: 2327 - RNA, 14 nt, synthetic construct
  misc_feature 1..14: note = Description of Artificial Sequence: Synthetic oligonucleotide
  source 1..14: mol_type = other RNA
tgaacatccgttgg

SEQ ID NO: 2328 - RNA, 14 nt, synthetic construct
  misc_feature 1..14: note = Description of Artificial Sequence: Synthetic oligonucleotide
  source 1..14: mol_type = other RNA
tgaacacccgttgg

SEQ ID NO: 2329 - RNA, 15 nt, synthetic construct
  misc_feature 1..15: note = Description of Artificial Sequence: Synthetic oligonucleotide
  source 1..15: mol_type = other RNA
gtgaacaccccttgg

SEQ ID NO: 2330 - RNA, 15 nt, synthetic construct
  misc_feature 1..15: note = Description of Artificial Sequence: Synthetic oligonucleotide
  source 1..15: mol_type = other RNA
gtgaacatccgttgg

SEQ ID NO: 2331 - RNA, 15 nt, synthetic construct
  misc_feature 1..15: note = Description of Artificial Sequence: Synthetic oligonucleotide
  source 1..15: mol_type = other RNA
gtgaacatcccttgg

SEQ ID NO: 2332 - RNA, 15 nt, synthetic construct
  misc_feature 1..15: note = Description of Artificial Sequence: Synthetic oligonucleotide
  source 1..15: mol_type = other RNA
gtgaacacccattgg

SEQ ID NO: 2333 - RNA, 15 nt, synthetic construct
  misc_feature 1..15: note = Description of Artificial Sequence: Synthetic oligonucleotide
  source 1..15: mol_type = other RNA
gtgaacaccctttgg

SEQ ID NO: 2334 - RNA, 15 nt, synthetic construct
  misc_feature 1..15: note = Description of Artificial Sequence: Synthetic oligonucleotide
  source 1..15: mol_type = other RNA
gtgaacacccgttgg

SEQ ID NO: 2335 - RNA, 16 nt, synthetic construct
  misc_feature 1..16: note = Description of Artificial Sequence: Synthetic oligonucleotide
  source 1..16: mol_type = other RNA
agtgaacaccccttgg

SEQ ID NO: 2336 - RNA, 16 nt, synthetic construct
  misc_feature 1..16: note = Description of Artificial Sequence: Synthetic oligonucleotide
  source 1..16: mol_type = other RNA
agtgaacatccgttgg

SEQ ID NO: 2337 - RNA, 16 nt, synthetic construct
  misc_feature 1..16: note = Description of Artificial Sequence: Synthetic oligonucleotide
  source 1..16: mol_type = other RNA
agtgaacacccattgg

SEQ ID NO: 2338 - RNA, 16 nt, synthetic construct
  misc_feature 1..16: note = Description of Artificial Sequence: Synthetic oligonucleotide
  source 1..16: mol_type = other RNA
agtgaacaccctttgg

SEQ ID NO: 2339 - RNA, 16 nt, synthetic construct
  misc_feature 1..16: note = Description of Artificial Sequence: Synthetic oligonucleotide
  source 1..16: mol_type = other RNA
agtgaacacccgttgg

SEQ ID NO: 2340 - RNA, 16 nt, synthetic construct
  misc_feature 1..16: note = Description of Artificial Sequence: Synthetic oligonucleotide
  source 1..16: mol_type = other RNA
agtgaacatcccttgg

SEQ ID NO: 2341 - RNA, 18 nt, synthetic construct
  misc_feature 1..18: note = Description of Artificial Sequence: Synthetic oligonucleotide
  source 1..18: mol_type = other RNA
gcagtgaacatccgttgg

SEQ ID NO: 2342 - RNA, 18 nt, synthetic construct
  misc_feature 1..18: note = Description of Artificial Sequence: Synthetic oligonucleotide
  source 1..18: mol_type = other RNA
gcagtgaacaccccttgg

SEQ ID NO: 2343 - RNA, 18 nt, synthetic construct
  misc_feature 1..18: note = Description of Artificial Sequence: Synthetic oligonucleotide
  source 1..18: mol_type = other RNA
gcagtgaacacccgttgg

SEQ ID NO: 2344 - RNA, 18 nt, synthetic construct
  misc_feature 1..18: note = Description of Artificial Sequence: Synthetic oligonucleotide
  source 1..18: mol_type = other RNA
gcagtgaacacccattgg

SEQ ID NO: 2345 - RNA, 18 nt, synthetic construct
  misc_feature 1..18: note = Description of Artificial Sequence: Synthetic oligonucleotide
  source 1..18: mol_type = other RNA
gcagtgaacatcccttgg

SEQ ID NO: 2346 - RNA, 18 nt, synthetic construct
  misc_feature 1..18: note = Description of Artificial Sequence: Synthetic oligonucleotide
  source 1..18: mol_type = other RNA
gcagtgaacaccctttgg

SEQ ID NO: 2347 - RNA, 19 nt, synthetic construct
  misc_feature 1..19: note = Description of Artificial Sequence: Synthetic oligonucleotide
  source 1..19: mol_type = other RNA
agcagtgaacaccctttgg

SEQ ID NO: 2348 - RNA, 19 nt, synthetic construct
  misc_feature 1..19: note = Description of Artificial Sequence: Synthetic oligonucleotide
  source 1..19: mol_type = other RNA
agcagtgaacacccgttgg

SEQ ID NO: 2349 - RNA, 19 nt, synthetic construct
  misc_feature 1..19: note = Description of Artificial Sequence: Synthetic oligonucleotide
  source 1..19: mol_type = other RNA
agcagtgaacatcccttgg

SEQ ID NO: 2350 - RNA, 19 nt, synthetic construct
  misc_feature 1..19: note = Description of Artificial Sequence: Synthetic oligonucleotide
  source 1..19: mol_type = other RNA
agcagtgaacatccgttgg

SEQ ID NO: 2351 - RNA, 19 nt, synthetic construct
  misc_feature 1..19: note = Description of Artificial Sequence: Synthetic oligonucleotide
  source 1..19: mol_type = other RNA
agcagtgaacaccccttgg

SEQ ID NO: 2352 - RNA, 19 nt, synthetic construct
  misc_feature 1..19: note = Description of Artificial Sequence: Synthetic oligonucleotide
  source 1..19: mol_type = other RNA
agcagtgaacacccattgg

SEQ ID NO: 2353 - RNA, 22 nt, synthetic construct
  misc_feature 1..22: note = Description of Artificial Sequence: Synthetic oligonucleotide
  source 1..22: mol_type = other RNA
gccagcagtgaacaccccttgg

SEQ ID NO: 2354 - RNA, 22 nt, synthetic construct
  misc_feature 1..22: note = Description of Artificial Sequence: Synthetic oligonucleotide
  source 1..22: mol_type = other RNA
gccagcagtgaacatcccttgg

SEQ ID NO: 2355 - RNA, 22 nt, synthetic construct
  misc_feature 1..22: note = Description of Artificial Sequence: Synthetic oligonucleotide
  source 1..22: mol_type = other RNA
gccagcagtgaacacccgttgg

SEQ ID NO: 2356 - RNA, 22 nt, synthetic construct
  misc_feature 1..22: note = Description of Artificial Sequence: Synthetic oligonucleotide
  source 1..22: mol_type = other RNA
gccagcagtgaacaccctttgg

SEQ ID NO: 2357 - RNA, 22 nt, synthetic construct
  misc_feature 1..22: note = Description of Artificial Sequence: Synthetic oligonucleotide
  source 1..22: mol_type = other RNA
gccagcagtgaacatccgttgg

SEQ ID NO: 2358 - RNA, 22 nt, synthetic construct
  misc_feature 1..22: note = Description of Artificial Sequence: Synthetic oligonucleotide
  source 1..22: mol_type = other RNA
gccagcagtgaacacccattgg

SEQ ID NO: 2359 - RNA, 23 nt, synthetic construct
  misc_feature 1..23: note = Description of Artificial Sequence: Synthetic oligonucleotide
  source 1..23: mol_type = other RNA
ggccagcagtgaacaccccttgg

SEQ ID NO: 2360 - RNA, 23 nt, synthetic construct
  misc_feature 1..23: note = Description of Artificial Sequence: Synthetic oligonucleotide
  source 1..23: mol_type = other RNA
ggccagcagtgaacaccctttgg

SEQ ID NO: 2361 - RNA, 23 nt, synthetic construct
  misc_feature 1..23: note = Description of Artificial Sequence: Synthetic oligonucleotide
  source 1..23: mol_type = other RNA
ggccagcagtgaacacccgttgg

SEQ ID NO: 2362 - RNA, 23 nt, synthetic construct
  misc_feature 1..23: note = Description of Artificial Sequence: Synthetic oligonucleotide
  source 1..23: mol_type = other RNA
ggccagcagtgaacacccattgg

SEQ ID NO: 2363 - RNA, 24 nt, synthetic construct
  misc_feature 1..24: note = Description of Artificial Sequence: Synthetic oligonucleotide
  source 1..24: mol_type = other RNA
aggccagcagtgaacaccctttgg

SEQ ID NO: 2364 - RNA, 24 nt, synthetic construct
  misc_feature 1..24: note = Description of Artificial Sequence: Synthetic oligonucleotide
  source 1..24: mol_type = other RNA
aggccagcagtgaacaccccttgg

SEQ ID NO: 2365 - RNA, 24 nt, synthetic construct
  misc_feature 1..24: note = Description of Artificial Sequence: Synthetic oligonucleotide
  source 1..24: mol_type = other RNA
aggccagcagtgaacacccgttgg

SEQ ID NO: 2366 - RNA, 24 nt, synthetic construct
  misc_feature 1..24: note = Description of Artificial Sequence: Synthetic oligonucleotide
  source 1..24: mol_type = other RNA
aggccagcagtgaacacccattgg

SEQ ID NO: 2367 - RNA, 25 nt, synthetic construct
  misc_feature 1..25: note = Description of Artificial Sequence: Synthetic oligonucleotide
  source 1..25: mol_type = other RNA
gaggccagcagtgaacacccgttgg

SEQ ID NO: 2368 - RNA, 25 nt, synthetic construct
  misc_feature 1..25: note = Description of Artificial Sequence: Synthetic oligonucleotide
  source 1..25: mol_type = other RNA
gaggccagcagtgaacaccccttgg

SEQ ID NO: 2369 - RNA, 25 nt, synthetic construct
  misc_feature 1..25: note = Description of Artificial Sequence: Synthetic oligonucleotide
  source 1..25: mol_type = other RNA
gaggccagcagtgaacaccctttgg

SEQ ID NO: 2370 - RNA, 25 nt, synthetic construct
  misc_feature 1..25: note = Description of Artificial Sequence: Synthetic oligonucleotide
  source 1..25: mol_type = other RNA
gaggccagcagtgaacacccattgg

SEQ ID NO: 2371 - RNA, 26 nt, synthetic construct
  misc_feature 1..26: note = Description of Artificial Sequence: Synthetic oligonucleotide
  source 1..26: mol_type = other RNA
ggaggccagcagtgaacaccccttgg

SEQ ID NO: 2372 - RNA, 26 nt, synthetic construct
  misc_feature 1..26: note = Description of Artificial Sequence: Synthetic oligonucleotide
  source 1..26: mol_type = other RNA
ggaggccagcagtgaacacccgttgg

SEQ ID NO: 2373 - RNA, 26 nt, synthetic construct
  misc_feature 1..26: note = Description of Artificial Sequence: Synthetic oligonucleotide
  source 1..26: mol_type = other RNA
ggaggccagcagtgaacacccattgg

SEQ ID NO: 2374 - RNA, 26 nt, synthetic construct
  misc_feature 1..26: note = Description of Artificial Sequence: Synthetic oligonucleotide
  source 1..26: mol_type = other RNA
ggaggccagcagtgaacaccctttgg

SEQ ID NO: 2375 - RNA, 28 nt, synthetic construct
  misc_feature 1..28: note = Description of Artificial Sequence: Synthetic oligonucleotide
  source 1..28: mol_type = other RNA
gcggaggccagcagtgaacacccgttgg

SEQ ID NO: 2376 - RNA, 28 nt, synthetic construct
  misc_feature 1..28: note = Description of Artificial Sequence: Synthetic oligonucleotide
  source 1..28: mol_type = other RNA
gcggaggccagcagtgaacaccccttgg

SEQ ID NO: 2377 - RNA, 28 nt, synthetic construct
  misc_feature 1..28: note = Description of Artificial Sequence: Synthetic oligonucleotide
  source 1..28: mol_type = other RNA
gcggaggccagcagtgaacacccattgg

SEQ ID NO: 2378 - RNA, 28 nt, synthetic construct
  misc_feature 1..28: note = Description of Artificial Sequence: Synthetic oligonucleotide
  source 1..28: mol_type = other RNA
gcggaggccagcagtgaacaccctttgg

SEQ ID NO: 2379 - RNA, 29 nt, synthetic construct
  misc_feature 1..29: note = Description of Artificial Sequence: Synthetic oligonucleotide
  source 1..29: mol_type = other RNA
tgcggaggccagcagtgaacacccgttgg

SEQ ID NO: 2380 - RNA, 29 nt, synthetic construct
  misc_feature 1..29: note = Description of Artificial Sequence: Synthetic oligonucleotide
  source 1..29: mol_type = other RNA
tgcggaggccagcagtgaacaccccttgg

SEQ ID NO: 2381 - RNA, 29 nt, synthetic construct
  misc_feature 1..29: note = Description of Artificial Sequence: Synthetic oligonucleotide
  source 1..29: mol_type = other RNA
tgcggaggccagcagtgaacaccctttgg

SEQ ID NO: 2382 - RNA, 29 nt, synthetic construct
  misc_feature 1..29: note = Description of Artificial Sequence: Synthetic oligonucleotide
  source 1..29: mol_type = other RNA
tgcggaggccagcagtgaacacccattgg

SEQ ID NO: 2383 - RNA, 31 nt, synthetic construct
  misc_feature 1..31: note = Description of Artificial Sequence: Synthetic oligonucleotide
  source 1..31: mol_type = other RNA
actgcggaggccagcagtgaacacccattgg

SEQ ID NO: 2384 - RNA, 31 nt, synthetic construct
  misc_feature 1..31: note = Description of Artificial Sequence: Synthetic oligonucleotide
  source 1..31: mol_type = other RNA
actgcggaggccagcagtgaacacccgttgg

SEQ ID NO: 2385 - RNA, 31 nt, synthetic construct
  misc_feature 1..31: note = Description of Artificial Sequence: Synthetic oligonucleotide
  source 1..31: mol_type = other RNA
actgcggaggccagcagtgaacaccccttgg

SEQ ID NO: 2386 - RNA, 31 nt, synthetic construct
  misc_feature 1..31: note = Description of Artificial Sequence: Synthetic oligonucleotide
  source 1..31: mol_type = other RNA
actgcggaggccagcagtgaacaccctttgg

SEQ ID NO: 2387 - RNA, 32 nt, synthetic construct
  misc_feature 1..32: note = Description of Artificial Sequence: Synthetic oligonucleotide
  source 1..32: mol_type = other RNA
gactgcggaggccagcagtgaacaccccttgg

SEQ ID NO: 2388 - RNA, 32 nt, synthetic construct
  misc_feature 1..32: note = Description of Artificial Sequence: Synthetic oligonucleotide
  source 1..32: mol_type = other RNA
gactgcggaggccagcagtgaacacccattgg

SEQ ID NO: 2389 - RNA, 32 nt, synthetic construct
  misc_feature 1..32: note = Description of Artificial Sequence: Synthetic oligonucleotide
  source 1..32: mol_type = other RNA
gactgcggaggccagcagtgaacacccgttgg

SEQ ID NO: 2390 - RNA, 32 nt, synthetic construct
  misc_feature 1..32: note = Description of Artificial Sequence: Synthetic oligonucleotide
  source 1..32: mol_type = other RNA
gactgcggaggccagcagtgaacaccctttgg

SEQ ID NO: 2391 - RNA, 33 nt, synthetic construct
  misc_feature 1..33: note = Description of Artificial Sequence: Synthetic oligonucleotide
  source 1..33: mol_type = other RNA
ggactgcggaggccagcagtgaacaccctttgg

SEQ ID NO: 2392 - RNA, 33 nt, synthetic construct
  misc_feature 1..33: note = Description of Artificial Sequence: Synthetic oligonucleotide
  source 1..33: mol_type = other RNA
ggactgcggaggccagcagtgaacacccattgg

SEQ ID NO: 2393 - RNA, 33 nt, synthetic construct
  misc_feature 1..33: note = Description of Artificial Sequence: Synthetic oligonucleotide
  source 1..33: mol_type = other RNA
ggactgcggaggccagcagtgaacaccccttgg

SEQ ID NO: 2394 - RNA, 33 nt, synthetic construct
  misc_feature 1..33: note = Description of Artificial Sequence: Synthetic oligonucleotide
  source 1..33: mol_type = other RNA
ggactgcggaggccagcagtgaacacccgttgg

SEQ ID NO: 2395 - RNA, 34 nt, synthetic construct
  misc_feature 1..34: note = Description of Artificial Sequence: Synthetic oligonucleotide
  source 1..34: mol_type = other RNA
gggactgcggaggccagcagtgaacaccccttgg

SEQ ID NO: 2396 - RNA, 34 nt, synthetic construct
  misc_feature 1..34: note = Description of Artificial Sequence: Synthetic oligonucleotide
  source 1..34: mol_type = other RNA
gggactgcggaggccagcagtgaacaccctttgg

SEQ ID NO: 2397 - RNA, 34 nt, synthetic construct
  misc_feature 1..34: note = Description of Artificial Sequence: Synthetic oligonucleotide
  source 1..34: mol_type = other RNA
gggactgcggaggccagcagtgaacacccgttgg

SEQ ID NO: 2398 - RNA, 34 nt, synthetic construct
  misc_feature 1..34: note = Description of Artificial Sequence: Synthetic oligonucleotide
  source 1..34: mol_type = other RNA
gggactgcggaggccagcagtgaacacccattgg

SEQ ID NO: 2399 - RNA, 35 nt, synthetic construct
  misc_feature 1..35: note = Description of Artificial Sequence: Synthetic oligonucleotide
  source 1..35: mol_type = other RNA
ggggactgcggaggccagcagtgaacacccgttgg

SEQ ID NO: 2400 - RNA, 35 nt, synthetic construct
  misc_feature 1..35: note = Description of Artificial Sequence: Synthetic oligonucleotide
  source 1..35: mol_type = other RNA
ggggactgcggaggccagcagtgaacaccctttgg

SEQ ID NO: 2401 - RNA, 35 nt, synthetic construct
  misc_feature 1..35: note = Description of Artificial Sequence: Synthetic oligonucleotide
  source 1..35: mol_type = other RNA
ggggactgcggaggccagcagtgaacaccccttgg

SEQ ID NO: 2402 - RNA, 35 nt, synthetic construct
  misc_feature 1..35: note = Description of Artificial Sequence: Synthetic oligonucleotide
  source 1..35: mol_type = other RNA
ggggactgcggaggccagcagtgaacacccattgg

SEQ ID NO: 2403 - RNA, 36 nt, synthetic construct
  misc_feature 1..36: note = Description of Artificial Sequence: Synthetic oligonucleotide
  source 1..36: mol_type = other RNA
tggggactgcggaggccagcagtgaacacccgttgg

SEQ ID NO: 2404 - RNA, 36 nt, synthetic construct
  misc_feature 1..36: note = Description of Artificial Sequence: Synthetic oligonucleotide
  source 1..36: mol_type = other RNA
tggggactgcggaggccagcagtgaacaccccttgg

SEQ ID NO: 2405 - RNA, 36 nt, synthetic construct
  misc_feature 1..36: note = Description of Artificial Sequence: Synthetic oligonucleotide
  source 1..36: mol_type = other RNA
tggggactgcggaggccagcagtgaacaccctttgg

SEQ ID NO: 2406 - RNA, 36 nt, synthetic construct
  misc_feature 1..36: note = Description of Artificial Sequence: Synthetic oligonucleotide
  source 1..36: mol_type = other RNA
tggggactgcggaggccagcagtgaacacccattgg

SEQ ID NO: 2407 - RNA, 37 nt, synthetic construct
  misc_feature 1..37: note = Description of Artificial Sequence: Synthetic oligonucleotide
  source 1..37: mol_type = other RNA
gtggggactgcggaggccagcagtgaacaccctttgg

SEQ ID NO: 2408 - RNA, 37 nt, synthetic construct
  misc_feature 1..37: note = Description of Artificial Sequence: Synthetic oligonucleotide
  source 1..37: mol_type = other RNA
gtggggactgcggaggccagcagtgaacacccattgg

SEQ ID NO: 2409 - RNA, 37 nt, synthetic construct
  misc_feature 1..37: note = Description of Artificial Sequence: Synthetic oligonucleotide
  source 1..37: mol_type = other RNA
gtggggactgcggaggccagcagtgaacacccgttgg

SEQ ID NO: 2410 - RNA, 37 nt, synthetic construct
  misc_feature 1..37: note = Description of Artificial Sequence: Synthetic oligonucleotide
  source 1..37: mol_type = other RNA
gtggggactgcggaggccagcagtgaacaccccttgg

SEQ ID NO: 2411 - RNA, 38 nt, synthetic construct
  misc_feature 1..38: note = Description of Artificial Sequence: Synthetic oligonucleotide
  source 1..38: mol_type = other RNA
ggtggggactgcggaggccagcagtgaacaccccttgg

SEQ ID NO: 2412 - RNA, 38 nt, synthetic construct
  misc_feature 1..38: note = Description of Artificial Sequence: Synthetic oligonucleotide
  source 1..38: mol_type = other RNA
ggtggggactgcggaggccagcagtgaacaccctttgg

SEQ ID NO: 2413 - RNA, 38 nt, synthetic construct
  misc_feature 1..38: note = Description of Artificial Sequence: Synthetic oligonucleotide
  source 1..38: mol_type = other RNA
ggtggggactgcggaggccagcagtgaacacccgttgg

SEQ ID NO: 2414 - RNA, 38 nt, synthetic construct
  misc_feature 1..38: note = Description of Artificial Sequence: Synthetic oligonucleotide
  source 1..38: mol_type = other RNA
ggtggggactgcggaggccagcagtgaacacccattgg

SEQ ID NO: 2415 - RNA, 39 nt, synthetic construct
  misc_feature 1..39: note = Description of Artificial Sequence: Synthetic oligonucleotide
  source 1..39: mol_type = other RNA
tggtggggactgcggaggccagcagtgaacacccattgg

SEQ ID NO: 2416 - RNA, 39 nt, synthetic construct
  misc_feature 1..39: note = Description of Artificial Sequence: Synthetic oligonucleotide
  source 1..39: mol_type = other RNA
tggtggggactgcggaggccagcagtgaacacccgttgg

SEQ ID NO: 2417 - RNA, 39 nt, synthetic construct
  misc_feature 1..39: note = Description of Artificial Sequence: Synthetic oligonucleotide
  source 1..39: mol_type = other RNA
tggtggggactgcggaggccagcagtgaacaccccttgg

SEQ ID NO: 2418 - RNA, 39 nt, synthetic construct
  misc_feature 1..39: note = Description of Artificial Sequence: Synthetic oligonucleotide
  source 1..39: mol_type = other RNA
tggtggggactgcggaggccagcagtgaacaccctttgg

SEQ ID NO: 2419 - RNA, 40 nt, synthetic construct
  misc_feature 1..40: note = Description of Artificial Sequence: Synthetic oligonucleotide
  source 1..40: mol_type = other RNA
gtggtggggactgcggaggccagcagtgaacacccattgg

SEQ ID NO: 2420 - RNA, 40 nt, synthetic construct
  misc_feature 1..40: note = Description of Artificial Sequence: Synthetic oligonucleotide
  source 1..40: mol_type = other RNA
gtggtggggactgcggaggccagcagtgaacacccgttgg

SEQ ID NO: 2421 - RNA, 40 nt, synthetic construct
  misc_feature 1..40: note = Description of Artificial Sequence: Synthetic oligonucleotide
  source 1..40: mol_type = other RNA
gtggtggggactgcggaggccagcagtgaacaccccttgg

SEQ ID NO: 2422 - RNA, 40 nt, synthetic construct
  misc_feature 1..40: note = Description of Artificial Sequence: Synthetic oligonucleotide
  source 1..40: mol_type = other RNA
gtggtggggactgcggaggccagcagtgaacaccctttgg

SEQ ID NO: 2423 - RNA, 20 nt, synthetic construct
  misc_feature 1..20: note = Description of Artificial Sequence: Synthetic oligonucleotide
  source 1..20: mol_type = other RNA
cactgcccctcaggaaggtt

SEQ ID NO: 2424 - RNA, 20 nt, synthetic construct
  misc_feature 1..20: note = Description of Artificial Sequence: Synthetic oligonucleotide
  source 1..20: mol_type = other RNA
ctgtaaagaggtacgtggac

SEQ ID NO: 2425 - RNA, 20 nt, synthetic construct
  misc_feature 1..20: note = Description of Artificial Sequence: Synthetic oligonucleotide
  source 1..20: mol_type = other RNA
cagtcaccaaatactgtaaa

SEQ ID NO: 2426 - RNA, 20 nt, synthetic construct
  misc_feature 1..20: note = Description of Artificial Sequence: Synthetic oligonucleotide
  source 1..20: mol_type = other RNA
tcaggaaggttctggctgtg

SEQ ID NO: 2427 - RNA, 20 nt, synthetic construct
  misc_feature 1..20: note = Description of Artificial Sequence: Synthetic oligonucleotide
  source 1..20: mol_type = other RNA
agaggtacgtggacttgggc

SEQ ID NO: 2428 - RNA, 20 nt, synthetic construct
  misc_feature 1..20: note = Description of Artificial Sequence: Synthetic oligonucleotide
  source 1..20: mol_type = other RNA
gggtgctcctgctgggggat

SEQ ID NO: 2429 - RNA, 20 nt, synthetic construct
  misc_feature 1..20: note = Description of Artificial Sequence: Synthetic oligonucleotide
  source 1..20: mol_type = other RNA
ccctcaggaaggttctggct

SEQ ID NO: 2430 - RNA, 20 nt, synthetic construct
  misc_feature 1..20: note = Description of Artificial Sequence: Synthetic oligonucleotide
  source 1..20: mol_type = other RNA
gatgtggccacactgcccct

SEQ ID NO: 2431 - RNA, 20 nt, synthetic construct
  misc_feature 1..20: note = Description of Artificial Sequence: Synthetic oligonucleotide
  source 1..20: mol_type = other RNA
ttctggctgtggtggggact

SEQ ID NO: 2432 - RNA, 20 nt, synthetic construct
  misc_feature 1..20: note = Description of Artificial Sequence: Synthetic oligonucleotide
  source 1..20: mol_type = other RNA
aggccagcagtgaacacccc

SEQ ID NO: 2433 - RNA, 20 nt, synthetic construct
  misc_feature 1..20: note = Description of Artificial Sequence: Synthetic oligonucleotide
  source 1..20: mol_type = other RNA
gcagtgaacaccccttgggc

SEQ ID NO: 2434 - RNA, 20 nt, synthetic construct
  misc_feature 1..20: note = Description of Artificial Sequence: Synthetic oligonucleotide
  source 1..20: mol_type = other RNA
tggctgtggtggggactgcg

SEQ ID NO: 2435 - RNA, 20 nt, synthetic construct
  misc_feature 1..20: note = Description of Artificial Sequence: Synthetic oligonucleotide
  source 1..20: mol_type = other RNA
gggtcatgcgggtgctcctg

SEQ ID NO: 2436 - RNA, 20 nt, synthetic construct
  misc_feature 1..20: note = Description of Artificial Sequence: Synthetic oligonucleotide
  source 1..20: mol_type = other RNA
tggccacactgcccctcagg

SEQ ID NO: 2437 - RNA, 20 nt, synthetic construct
  misc_feature 1..20: note = Description of Artificial Sequence: Synthetic oligonucleotide
  source 1..20: mol_type = other RNA
tggcgtccccagggtcatgc

SEQ ID NO: 2438 - RNA, 20 nt, synthetic construct
  misc_feature 1..20: note = Description of Artificial Sequence: Synthetic oligonucleotide
  source 1..20: mol_type = other RNA
ggccagcagtgaacacccgt

SEQ ID NO: 2439 - RNA, 20 nt, synthetic construct
  misc_feature 1..20: note = Description of Artificial Sequence: Synthetic oligonucleotide
  source 1..20: mol_type = other RNA
atggcgtccccagggtcatg

SEQ ID NO: 2440 - RNA, 20 nt, synthetic construct
  misc_feature 1..20: note = Description of Artificial Sequence: Synthetic oligonucleotide
  source 1..20: mol_type = other RNA
caaatactgtaaagaggtac

SEQ ID NO: 2441 - RNA, 20 nt, synthetic construct
  misc_feature 1..20: note = Description of Artificial Sequence: Synthetic oligonucleotide
  source 1..20: mol_type = other RNA
gccagcagtgaacacccgtt

SEQ ID NO: 2442 - RNA, 20 nt, synthetic construct
  misc_feature 1..20: note = Description of Artificial Sequence: Synthetic oligonucleotide
  source 1..20: mol_type = other RNA
cagggtcatgcgggtgctcc

SEQ ID NO: 2443 - RNA, 20 nt, synthetic construct
  misc_feature 1..20: note = Description of Artificial Sequence: Synthetic oligonucleotide
  source 1..20: mol_type = other RNA
gtcatgcgggtgctcctgct

SEQ ID NO: 2444 - RNA, 20 nt, synthetic construct
  misc_feature 1..20: note = Description of Artificial Sequence: Synthetic oligonucleotide
  source 1..20: mol_type = other RNA
ggtcatgcgggtgctcctgc

SEQ ID NO: 2445 - RNA, 114 nt, synthetic construct
  misc_feature 1..114: note = Description of Artificial Sequence: Synthetic polynucleotide
  source 1..114: mol_type = other RNA
tttggtgactgccacgcccagttttagagctagaaatagcaagttaaaataaggctagtccgttatcaacttgaaaaagtggcaccgagtcggtgcacaccctttgggcgtggc

SEQ ID NO: 2446 - RNA, 114 nt, synthetic construct
  misc_feature 1..114: note = Description of Artificial Sequence: Synthetic polynucleotide
  source 1..114: mol_type = other RNA
tttggtgactgccacgcccagttttagagctagaaatagcaagttaaaataaggctagtccgttatcaacttgaaaaagtggcaccgagtcggtgcacacccattgggcgtggc

SEQ ID NO: 2447 - RNA, 114 nt, synthetic construct
  misc_feature 1..114: note = Description of Artificial Sequence: Synthetic polynucleotide
  source 1..114: mol_type = other RNA
tttggtgactgccacgcccagttttagagctagaaatagcaagttaaaataaggctagtccgttatcaacttgaaaaagtggcaccgagtcggtgcacaccccttgggcgtggc

SEQ ID NO: 2448 - RNA, 114 nt, synthetic construct
  misc_feature 1..114: note = Description of Artificial Sequence: Synthetic polynucleotide
  source 1..114: mol_type = other RNA
tttggtgactgccacgcccagttttagagctagaaatagcaagttaaaataaggctagtccgttatcaacttgaaaaagtggcaccgagtcggtgcacacccgttgggcgtggc

SEQ ID NO: 2449 - RNA, 115 nt, synthetic construct
  misc_feature 1..115: note = Description of Artificial Sequence: Synthetic polynucleotide
  source 1..115: mol_type = other RNA
tttggtgactgccacgcccagttttagagctagaaatagcaagttaaaataaggctagtccgttatcaacttgaaaaagtggcaccgagtcggtgcaacaccctttgggcgtggc

SEQ ID NO: 2450 - RNA, 115 nt, synthetic construct
  misc_feature 1..115: note = Description of Artificial Sequence: Synthetic polynucleotide
  source 1..115: mol_type = other RNA
tttggtgactgccacgcccagttttagagctagaaatagcaagttaaaataaggctagtccgttatcaacttgaaaaagtggcaccgagtcggtgcaacaccccttgggcgtggc

SEQ ID NO: 2451 - RNA, 115 nt, synthetic construct
  misc_feature 1..115: note = Description of Artificial Sequence: Synthetic polynucleotide
  source 1..115: mol_type = other RNA
tttggtgactgccacgcccagttttagagctagaaatagcaagttaaaataaggctagtccgttatcaacttgaaaaagtggcaccgagtcggtgcacaccctttgggcgtggca

SEQ ID NO: 2452 - RNA, 115 nt, synthetic construct
  misc_feature 1..115: note = Description of Artificial Sequence: Synthetic polynucleotide
  source 1..115: mol_type = other RNA
tttggtgactgccacgcccagttttagagctagaaatagcaagttaaaataaggctagtccgttatcaacttgaaaaagtggcaccgagtcggtgcaacacccgttgggcgtggc

SEQ ID NO: 2453 - RNA, 115 nt, synthetic construct
  misc_feature 1..115: note = Description of Artificial Sequence: Synthetic polynucleotide
  source 1..115: mol_type = other RNA
tttggtgactgccacgcccagttttagagctagaaatagcaagttaaaataaggctagtccgttatcaacttgaaaaagtggcaccgagtcggtgcacaccccttgggcgtggca

SEQ ID NO: 2454 - RNA, 115 nt, synthetic construct
  misc_feature 1..115: note = Description of Artificial Sequence: Synthetic polynucleotide
  source 1..115: mol_type = other RNA
tttggtgactgccacgcccagttttagagctagaaatagcaagttaaaataaggctagtccgttatcaacttgaaaaagtggcaccgagtcggtgcaacacccattgggcgtggc

SEQ ID NO: 2455 - RNA, 115 nt, synthetic construct
  misc_feature 1..115: note = Description of Artificial Sequence: Synthetic polynucleotide
  source 1..115: mol_type = other RNA
tttggtgactgccacgcccagttttagagctagaaatagcaagttaaaataaggctagtccgttatcaacttgaaaaagtggcaccgagtcggtgcacatccgttgggcgtggca

SEQ ID NO: 2456 - RNA, 115 nt, synthetic construct
  misc_feature 1..115: note = Description of Artificial Sequence: Synthetic polynucleotide
  source 1..115: mol_type = other RNA
tttggtgactgccacgcccagttttagagctagaaatagcaagttaaaataaggctagtccgttatcaacttgaaaaagtggcaccgagtcggtgcacatcccttgggcgtggca

SEQ ID NO: 2457 - RNA, 115 nt, synthetic construct
  misc_feature 1..115: note = Description of Artificial Sequence: Synthetic polynucleotide
  source 1..115: mol_type = other RNA
tttggtgactgccacgcccagttttagagctagaaatagcaagttaaaataaggctagtccgttatcaacttgaaaaagtggcaccgagtcggtgcacacccattgggcgtggca

SEQ ID NO: 2458 - RNA, 115 nt, synthetic construct
  misc_feature 1..115: note = Description of Artificial Sequence: Synthetic polynucleotide
  source 1..115: mol_type = other RNA
tttggtgactgccacgcccagttttagagctagaaatagcaagttaaaataaggctagtccgttatcaacttgaaaaagtggcaccgagtcggtgcacacccgttgggcgtggca

SEQ ID NO: 2459 - RNA, 116 nt, synthetic construct
  misc_feature 1..116: note = Description of Artificial Sequence: Synthetic polynucleotide
  source 1..116: mol_type = other RNA
tttggtgactgccacgcccagttttagagctagaaatagcaagttaaaataaggctagtccgttatcaacttgaaaaagtggcaccgagtcggtgcaacaccccttgggcgtggca

SEQ ID NO: 2460 - RNA, 116 nt, synthetic construct
  misc_feature 1..116: note = Description of Artificial Sequence: Synthetic polynucleotide
  source 1..116: mol_type = other RNA
tttggtgactgccacgcccagttttagagctagaaatagcaagttaaaataaggctagtccgttatcaacttgaaaaagtggcaccgagtcggtgcaacaccctttgggcgtggca

SEQ ID NO: 2461 - RNA, 116 nt, synthetic construct
  misc_feature 1..116: note = Description of Artificial Sequence: Synthetic polynucleotide
  source 1..116: mol_type = other RNA
tttggtgactgccacgcccagttttagagctagaaatagcaagttaaaataaggctagtccgttatcaacttgaaaaagtggcaccgagtcggtgcaacacccattgggcgtggca

SEQ ID NO: 2462 - RNA, 116 nt, synthetic construct
  misc_feature 1..116: note = Description of Artificial Sequence: Synthetic polynucleotide
  source 1..116: mol_type = other RNA
tttggtgactgccacgcccagttttagagctagaaatagcaagttaaaataaggctagtccgttatcaacttgaaaaagtggcaccgagtcggtgcacacccattgggcgtggcag

SEQ ID NO: 2463 - RNA, 116 nt, synthetic construct
  misc_feature 1..116: note = Description of Artificial Sequence: Synthetic polynucleotide
  source 1..116: mol_type = other RNA
tttggtgactgccacgcccagttttagagctagaaatagcaagttaaaataaggctagtccgttatcaacttgaaaaagtggcaccgagtcggtgcaacatcccttgggcgtggca

SEQ ID NO: 2464 - RNA, 116 nt, synthetic construct
  misc_feature 1..116: note = Description of Artificial Sequence: Synthetic polynucleotide
  source 1..116: mol_type = other RNA
tttggtgactgccacgcccagttttagagctagaaatagcaagttaaaataaggctagtccgttatcaacttgaaaaagtggcaccgagtcggtgcacacccgttgggcgtggcag

SEQ ID NO: 2465 - RNA, 116 nt, synthetic construct
  misc_feature 1..116: note = Description of Artificial Sequence: Synthetic polynucleotide
  source 1..116: mol_type = other RNA
tttggtgactgccacgcccagttttagagctagaaatagcaagttaaaataaggctagtccgttatcaacttgaaaaagtggcaccgagtcggtgcacaccctttgggcgtggcag

SEQ ID NO: 2466 - RNA, 116 nt, synthetic construct
  misc_feature 1..116: note = Description of Artificial Sequence: Synthetic polynucleotide
  source 1..116: mol_type = other RNA
tttggtgactgccacgcccagttttagagctagaaatagcaagttaaaataaggctagtccgttatcaacttgaaaaagtggcaccgagtcggtgcaacacccgttgggcgtggca

SEQ ID NO: 2467 - RNA, 116 nt, synthetic construct
  misc_feature 1..116: note = Description of Artificial Sequence: Synthetic polynucleotide
  source 1..116: mol_type = other RNA
tttggtgactgccacgcccagttttagagctagaaatagcaagttaaaataaggctagtccgttatcaacttgaaaaagtggcaccgagtcggtgcacaccccttgggcgtggcag

SEQ ID NO: 2468 - RNA, 116 nt, synthetic construct
  misc_feature 1..116: note = Description of Artificial Sequence: Synthetic polynucleotide
  source 1..116: mol_type = other RNA
tttggtgactgccacgcccagttttagagctagaaatagcaagttaaaataaggctagtccgttatcaacttgaaaaagtggcaccgagtcggtgcgaacacccgttgggcgtggc

SEQ ID NO: 2469 - RNA, 116 nt, synthetic construct
  misc_feature 1..116: note = Description of Artificial Sequence: Synthetic polynucleotide
  source 1..116: mol_type = other RNA
tttggtgactgccacgcccagttttagagctagaaatagcaagttaaaataaggctagtccgttatcaacttgaaaaagtggcaccgagtcggtgcgaacaccctttgggcgtggc

SEQ ID NO: 2470 - RNA, 116 nt, synthetic construct
  misc_feature 1..116: note = Description of Artificial Sequence: Synthetic polynucleotide
  source 1..116: mol_type = other RNA
tttggtgactgccacgcccagttttagagctagaaatagcaagttaaaataaggctagtccgttatcaacttgaaaaagtggcaccgagtcggtgcgaacacccattgggcgtggc

SEQ ID NO: 2471 - RNA, 116 nt, synthetic construct
  misc_feature 1..116: note = Description of Artificial Sequence: Synthetic polynucleotide
  source 1..116: mol_type = other RNA
tttggtgactgccacgcccagttttagagctagaaatagcaagttaaaataaggctagtccgttatcaacttgaaaaagtggcaccgagtcggtgcaacatccgttgggcgtggca

SEQ ID NO: 2472 - RNA, 116 nt, synthetic construct
  misc_feature 1..116: note = Description of Artificial Sequence: Synthetic polynucleotide
  source 1..116: mol_type = other RNA
tttggtgactgccacgcccagttttagagctagaaatagcaagttaaaataaggctagtccgttatcaacttgaaaaagtggcaccgagtcggtgcgaacaccccttgggcgtggc

SEQ ID NO: 2473 - RNA, 117 nt, synthetic construct
  misc_feature 1..117: note = Description of Artificial Sequence: Synthetic polynucleotide
  source 1..117: mol_type = other RNA
tttggtgactgccacgcccagttttagagctagaaatagcaagttaaaataaggctagtccgttatcaacttgaaaaagtggcaccgagtcggtgcgaacaccctttgggcgtggca

SEQ ID NO: 2474 - RNA, 117 nt, synthetic construct
  misc_feature 1..117: note = Description of Artificial Sequence: Synthetic polynucleotide
  source 1..117: mol_type = other RNA
tttggtgactgccacgcccagttttagagctagaaatagcaagttaaaataaggctagtccgttatcaacttgaaaaagtggcaccgagtcggtgcgaacatcccttgggcgtggca

SEQ ID NO: 2475 - RNA, 117 nt, synthetic construct
  misc_feature 1..117: note = Description of Artificial Sequence: Synthetic polynucleotide
  source 1..117: mol_type = other RNA
tttggtgactgccacgcccagttttagagctagaaatagcaagttaaaataaggctagtccgttatcaacttgaaaaagtggcaccgagtcggtgcaacaccctttgggcgtggcag

SEQ ID NO: 2476 - RNA, 117 nt, synthetic construct
  misc_feature 1..117: note = Description of Artificial Sequence: Synthetic polynucleotide
  source 1..117: mol_type = other RNA
tttggtgactgccacgcccagttttagagctagaaatagcaagttaaaataaggctagtccgttatcaacttgaaaaagtggcaccgagtcggtgcaacacccgttgggcgtggcag

SEQ ID NO: 2477 - RNA, 117 nt, synthetic construct
  misc_feature 1..117: note = Description of Artificial Sequence: Synthetic polynucleotide
  source 1..117: mol_type = other RNA
tttggtgactgccacgcccagttttagagctagaaatagcaagttaaaataaggctagtccgttatcaacttgaaaaagtggcaccgagtcggtgctgaacacccattgggcgtggc

SEQ ID NO: 2478 - RNA, 117 nt, synthetic construct
  misc_feature 1..117: note = Description of Artificial Sequence: Synthetic polynucleotide
  source 1..117: mol_type = other RNA
tttggtgactgccacgcccagttttagagctagaaatagcaagttaaaataaggctagtccgttatcaacttgaaaaagtggcaccgagtcggtgcacaccctttgggcgtggcagt

SEQ ID NO: 2479 - RNA, 117 nt, synthetic construct
  misc_feature 1..117: note = Description of Artificial Sequence: Synthetic polynucleotide
  source 1..117: mol_type = other RNA
tttggtgactgccacgcccagttttagagctagaaatagcaagttaaaataaggctagtccgttatcaacttgaaaaagtggcaccgagtcggtgcaacaccccttgggcgtggcag

SEQ ID NO: 2480 - RNA, 117 nt, synthetic construct
  misc_feature 1..117: note = Description of Artificial Sequence: Synthetic polynucleotide
  source 1..117: mol_type = other RNA
tttggtgactgccacgcccagttttagagctagaaatagcaagttaaaataaggctagtccgttatcaacttgaaaaagtggcaccgagtcggtgcacaccccttgggcgtggcagt

SEQ ID NO: 2481 - RNA, 117 nt, synthetic construct
  misc_feature 1..117: note = Description of Artificial Sequence: Synthetic polynucleotide
  source 1..117: mol_type = other RNA
tttggtgactgccacgcccagttttagagctagaaatagcaagttaaaataaggctagtccgttatcaacttgaaaaagtggcaccgagtcggtgctgaacacccgttgggcgtggc

SEQ ID NO: 2482 - RNA, 117 nt, synthetic construct
  misc_feature 1..117: note = Description of Artificial Sequence: Synthetic polynucleotide
  source 1..117: mol_type = other RNA
tttggtgactgccacgcccagttttagagctagaaatagcaagttaaaataaggctagtccgttatcaacttgaaaaagtggcaccgagtcggtgcgaacatccgttgggcgtggca

SEQ ID NO: 2483 - RNA, 117 nt, synthetic construct
  misc_feature 1..117: note = Description of Artificial Sequence: Synthetic polynucleotide
  source 1..117: mol_type = other RNA
tttggtgactgccacgcccagttttagagctagaaatagcaagttaaaataaggctagtccgttatcaacttgaaaaagtggcaccgagtcggtgcaacacccattgggcgtggcag

SEQ ID NO: 2484 - RNA, 117 nt, synthetic construct
  misc_feature 1..117: note = Description of Artificial Sequence: Synthetic polynucleotide
  source 1..117: mol_type = other RNA
tttggtgactgccacgcccagttttagagctagaaatagcaagttaaaataaggctagtccgttatcaacttgaaaaagtggcaccgagtcggtgcgaacacccattgggcgtggca

SEQ ID NO: 2485 - RNA, 117 nt, synthetic construct
  misc_feature 1..117: note = Description of Artificial Sequence: Synthetic polynucleotide
  source 1..117: mol_type = other RNA
tttggtgactgccacgcccagttttagagctagaaatagcaagttaaaataaggctagtccgttatcaacttgaaaaagtggcaccgagtcggtgcacatcccttgggcgtggcagt

SEQ ID NO: 2486 - RNA, 117 nt, synthetic construct
  misc_feature 1..117: note = Description of Artificial Sequence: Synthetic polynucleotide
  source 1..117: mol_type = other RNA
tttggtgactgccacgcccagttttagagctagaaatagcaagttaaaataaggctagtccgttatcaacttgaaaaagtggcaccgagtcggtgcacatccgttgggcgtggcagt

SEQ ID NO: 2487 - RNA, 117 nt, synthetic construct
  misc_feature 1..117: note = Description of Artificial Sequence: Synthetic polynucleotide
  source 1..117: mol_type = other RNA
tttggtgactgccacgcccagttttagagctagaaatagcaagttaaaataaggctagtccgttatcaacttgaaaaagtggcaccgagtcggtgcacacccgttgggcgtggcagt

SEQ ID NO: 2488 - RNA, 117 nt, synthetic construct
  misc_feature 1..117: note = Description of Artificial Sequence: Synthetic polynucleotide
  source 1..117: mol_type = other RNA
tttggtgactgccacgcccagttttagagctagaaatagcaagttaaaataaggctagtccgttatcaacttgaaaaagtggcaccgagtcggtgcacacccattgggcgtggcagt

SEQ ID NO: 2489 - RNA, 117 nt, synthetic construct
  misc_feature 1..117: note = Description of Artificial Sequence: Synthetic polynucleotide
  source 1..117: mol_type = other RNA
tttggtgactgccacgcccagttttagagctagaaatagcaagttaaaataaggctagtccgttatcaacttgaaaaagtggcaccgagtcggtgcgaacaccccttgggcgtggca

SEQ ID NO: 2490 - RNA, 117 nt, synthetic construct
  misc_feature 1..117: note = Description of Artificial Sequence: Synthetic polynucleotide
  source 1..117: mol_type = other RNA
tttggtgactgccacgcccagttttagagctagaaatagcaagttaaaataaggctagtccgttatcaacttgaaaaagtggcaccgagtcggtgcgaacacccgttgggcgtggca

SEQ ID NO: 2491 - RNA, 117 nt, synthetic construct
  misc_feature 1..117: note = Description of Artificial Sequence: Synthetic polynucleotide
  source 1..117: mol_type = other RNA
tttggtgactgccacgcccagttttagagctagaaatagcaagttaaaataaggctagtccgttatcaacttgaaaaagtggcaccgagtcggtgctgaacaccctttgggcgtggc

SEQ ID NO: 2492 - RNA, 117 nt, synthetic construct
  misc_feature 1..117: note = Description of Artificial Sequence: Synthetic polynucleotide
  source 1..117: mol_type = other RNA
tttggtgactgccacgcccagttttagagctagaaatagcaagttaaaataaggctagtccgttatcaacttgaaaaagtggcaccgagtcggtgctgaacaccccttgggcgtggc

SEQ ID NO: 2493 - RNA, 118 nt, synthetic construct
  misc_feature 1..118: note = Description of Artificial Sequence: Synthetic polynucleotide
  source 1..118: mol_type = other RNA
tttggtgactgccacgcccagttttagagctagaaatagcaagttaaaataaggctagtccgttatcaacttgaaaaagtggcaccgagtcggtgcaacacccattgggcgtggcagt

SEQ ID NO: 2494 - RNA, 118 nt, synthetic construct
  misc_feature 1..118: note = Description of Artificial Sequence: Synthetic polynucleotide
  source 1..118: mol_type = other RNA
tttggtgactgccacgcccagttttagagctagaaatagcaagttaaaataaggctagtccgttatcaacttgaaaaagtggcaccgagtcggtgcgaacaccctttgggcgtggcag

SEQ ID NO: 2495 - RNA, 118 nt, synthetic construct
  misc_feature 1..118: note = Description of Artificial Sequence: Synthetic polynucleotide
  source 1..118: mol_type = other RNA
tttggtgactgccacgcccagttttagagctagaaatagcaagttaaaataaggctagtccgttatcaacttgaaaaagtggcaccgagtcggtgcgaacacccattgggcgtggcag

SEQ ID NO: 2496 - RNA, 118 nt, synthetic construct
  misc_feature 1..118: note = Description of Artificial Sequence: Synthetic polynucleotide
  source 1..118: mol_type = other RNA
tttggtgactgccacgcccagttttagagctagaaatagcaagttaaaataaggctagtccgttatcaacttgaaaaagtggcaccgagtcggtgcgtgaacacccgttgggcgtggc

SEQ ID NO: 2497 - RNA, 118 nt, synthetic construct
  misc_feature 1..118: note = Description of Artificial Sequence: Synthetic polynucleotide
  source 1..118: mol_type = other RNA
tttggtgactgccacgcccagttttagagctagaaatagcaagttaaaataaggctagtccgttatcaacttgaaaaagtggcaccgagtcggtgcgaacacccgttgggcgtggcag

SEQ ID NO: 2498 - RNA, 118 nt, synthetic construct
  misc_feature 1..118: note = Description of Artificial Sequence: Synthetic polynucleotide
  source 1..118: mol_type = other RNA
tttggtgactgccacgcccagttttagagctagaaatagcaagttaaaataaggctagtccgttatcaacttgaaaaagtggcaccgagtcggtgcgtgaacacccattgggcgtggc

SEQ ID NO: 2499 - RNA, 118 nt, synthetic construct
  misc_feature 1..118: note = Description of Artificial Sequence: Synthetic polynucleotide
  source 1..118: mol_type = other RNA
tttggtgactgccacgcccagttttagagctagaaatagcaagttaaaataaggctagtccgttatcaacttgaaaaagtggcaccgagtcggtgcgaacaccccttgggcgtggcag

SEQ ID NO: 2500 - RNA, 118 nt, synthetic construct
  misc_feature 1..118: note = Description of Artificial Sequence: Synthetic polynucleotide
  source 1..118: mol_type = other RNA
tttggtgactgccacgcccagttttagagctagaaatagcaagttaaaataaggctagtccgttatcaacttgaaaaagtggcaccgagtcggtgcacaccctttgggcgtggcagtc

SEQ ID NO: 2501 - RNA, 118 nt, synthetic construct
  misc_feature 1..118: note = Description of Artificial Sequence: Synthetic polynucleotide
  source 1..118: mol_type = other RNA
tttggtgactgccacgcccagttttagagctagaaatagcaagttaaaataaggctagtccgttatcaacttgaaaaagtggcaccgagtcggtgctgaacaccctttgggcgtggca

SEQ ID NO: 2502 - RNA, 118 nt, synthetic construct
  misc_feature 1..118: note = Description of Artificial Sequence: Synthetic polynucleotide
  source 1..118: mol_type = other RNA
tttggtgactgccacgcccagttttagagctagaaatagcaagttaaaataaggctagtccgttatcaacttgaaaaagtggcaccgagtcggtgcgtgaacaccctttgggcgtggc

SEQ ID NO: 2503 - RNA, 118 nt, synthetic construct
  misc_feature 1..118: note = Description of Artificial Sequence: Synthetic polynucleotide
  source 1..118: mol_type = other RNA
tttggtgactgccacgcccagttttagagctagaaatagcaagttaaaataaggctagtccgttatcaacttgaaaaagtggcaccgagtcggtgcgtgaacaccccttgggcgtggc

SEQ ID NO: 2504 - RNA, 118 nt, synthetic construct
  misc_feature 1..118: note = Description of Artificial Sequence: Synthetic polynucleotide
  source 1..118: mol_type = other RNA
tttggtgactgccacgcccagttttagagctagaaatagcaagttaaaataaggctagtccgttatcaacttgaaaaagtggcaccgagtcggtgcacacccattgggcgtggcagtc

SEQ ID NO: 2505 - RNA, 118 nt, synthetic construct
  misc_feature 1..118: note = Description of Artificial Sequence: Synthetic polynucleotide
  source 1..118: mol_type = other RNA
tttggtgactgccacgcccagttttagagctagaaatagcaagttaaaataaggctagtccgttatcaacttgaaaaagtggcaccgagtcggtgcacaccccttgggcgtggcagtc

SEQ ID NO: 2506 - RNA, 118 nt, synthetic construct
  misc_feature 1..118: note = Description of Artificial Sequence: Synthetic polynucleotide
  source 1..118: mol_type = other RNA
tttggtgactgccacgcccagttttagagctagaaatagcaagttaaaataaggctagtccgttatcaacttgaaaaagtggcaccgagtcggtgcacacccgttgggcgtggcagtc

SEQ ID NO: 2507 - RNA, 118 nt, synthetic construct
  misc_feature 1..118: note = Description of Artificial Sequence: Synthetic polynucleotide
  source 1..118: mol_type = other RNA
tttggtgactgccacgcccagttttagagctagaaatagcaagttaaaataaggctagtccgttatcaacttgaaaaagtggcaccgagtcggtgctgaacatcccttgggcgtggca

SEQ ID NO: 2508 - RNA, 118 nt, synthetic construct
  misc_feature 1..118: note = Description of Artificial Sequence: Synthetic polynucleotide
  source 1..118: mol_type = other RNA
tttggtgactgccacgcccagttttagagctagaaatagcaagttaaaataaggctagtccgttatcaacttgaaaaagtggcaccgagtcggtgcaacatccgttgggcgtggcagt

SEQ ID NO: 2509 - RNA, 118 nt, synthetic construct
  misc_feature 1..118: note = Description of Artificial Sequence: Synthetic polynucleotide
  source 1..118: mol_type = other RNA
tttggtgactgccacgcccagttttagagctagaaatagcaagttaaaataaggctagtccgttatcaacttgaaaaagtggcaccgagtcggtgctgaacacccattgggcgtggca

SEQ ID NO: 2510 - RNA, 118 nt, synthetic construct
  misc_feature 1..118: note = Description of Artificial Sequence: Synthetic polynucleotide
  source 1..118: mol_type = other RNA
tttggtgactgccacgcccagttttagagctagaaatagcaagttaaaataaggctagtccgttatcaacttgaaaaagtggcaccgagtcggtgcaacaccccttgggcgtggcagt

SEQ ID NO: 2511 - RNA, 118 nt, synthetic construct
  misc_feature 1..118: note = Description of Artificial Sequence: Synthetic polynucleotide
  source 1..118: mol_type = other RNA
tttggtgactgccacgcccagttttagagctagaaatagcaagttaaaataaggctagtccgttatcaacttgaaaaagtggcaccgagtcggtgctgaacatccgttgggcgtggca

SEQ ID NO: 2512 - RNA, 118 nt, synthetic construct
  misc_feature 1..118: note = Description of Artificial Sequence: Synthetic polynucleotide
  source 1..118: mol_type = other RNA
tttggtgactgccacgcccagttttagagctagaaatagcaagttaaaataaggctagtccgttatcaacttgaaaaagtggcaccgagtcggtgctgaacacccgttgggcgtggca

SEQ ID NO: 2513 - RNA, 118 nt, synthetic construct
  misc_feature 1..118: note = Description of Artificial Sequence: Synthetic polynucleotide
  source 1..118: mol_type = other RNA
tttggtgactgccacgcccagttttagagctagaaatagcaagttaaaataaggctagtccgttatcaacttgaaaaagtggcaccgagtcggtgcaacacccgttgggcgtggcagt

SEQ ID NO: 2514 - RNA, 118 nt, synthetic construct
  misc_feature 1..118: note = Description of Artificial Sequence: Synthetic polynucleotide
  source 1..118: mol_type = other RNA
tttggtgactgccacgcccagttttagagctagaaatagcaagttaaaataaggctagtccgttatcaacttgaaaaagtggcaccgagtcggtgcaacaccctttgggcgtggcagt

SEQ ID NO: 2515 - RNA, 118 nt, synthetic construct
  misc_feature 1..118: note = Description of Artificial Sequence: Synthetic polynucleotide
  source 1..118: mol_type = other RNA
tttggtgactgccacgcccagttttagagctagaaatagcaagttaaaataaggctagtccgttatcaacttgaaaaagtggcaccgagtcggtgctgaacaccccttgggcgtggca

SEQ ID NO: 2516 - RNA, 118 nt, synthetic construct
  misc_feature 1..118: note = Description of Artificial Sequence: Synthetic polynucleotide
  source 1..118: mol_type = other RNA
tttggtgactgccacgcccagttttagagctagaaatagcaagttaaaataaggctagtccgttatcaacttgaaaaagtggcaccgagtcggtgcaacatcccttgggcgtggcagt

SEQ ID NO: 2517 - RNA, 119 nt, synthetic construct
  misc_feature 1..119: note = Description of Artificial Sequence: Synthetic polynucleotide
  source 1..119: mol_type = other RNA
tttggtgactgccacgcccagttttagagctagaaatagcaagttaaaataaggctagtccgttatcaacttgaaaaagtggcaccgagtcggtgctgaacacccgttgggcgtggcag

SEQ ID NO: 2518 - RNA, 119 nt, synthetic construct
  misc_feature 1..119: note = Description of Artificial Sequence: Synthetic polynucleotide
  source 1..119: mol_type = other RNA
tttggtgactgccacgcccagttttagagctagaaatagcaagttaaaataaggctagtccgttatcaacttgaaaaagtggcaccgagtcggtgcagtgaacaccccttgggcgtggc

SEQ ID NO: 2519 - RNA, 119 nt, synthetic construct
  misc_feature 1..119: note = Description of Artificial Sequence: Synthetic polynucleotide
  source 1..119: mol_type = other RNA
tttggtgactgccacgcccagttttagagctagaaatagcaagttaaaataaggctagtccgttatcaacttgaaaaagtggcaccgagtcggtgcaacaccctttgggcgtggcagtc

SEQ ID NO: 2520 - RNA, 119 nt, synthetic construct
  misc_feature 1..119: note = Description of Artificial Sequence: Synthetic polynucleotide
  source 1..119: mol_type = other RNA
tttggtgactgccacgcccagttttagagctagaaatagcaagttaaaataaggctagtccgttatcaacttgaaaaagtggcaccgagtcggtgcgaacaccctttgggcgtggcagt

SEQ ID NO: 2521 - RNA, 119 nt, synthetic construct
  misc_feature 1..119: note = Description of Artificial Sequence: Synthetic polynucleotide
  source 1..119: mol_type = other RNA
tttggtgactgccacgcccagttttagagctagaaatagcaagttaaaataaggctagtccgttatcaacttgaaaaagtggcaccgagtcggtgcagtgaacacccgttgggcgtggc

SEQ ID NO: 2522 - RNA, 119 nt, synthetic construct
  misc_feature 1..119: note = Description of Artificial Sequence: Synthetic polynucleotide
  source 1..119: mol_type = other RNA
tttggtgactgccacgcccagttttagagctagaaatagcaagttaaaataaggctagtccgttatcaacttgaaaaagtggcaccgagtcggtgcacaccccttgggcgtggcagtca

SEQ ID NO: 2523 - RNA, 119 nt, synthetic construct
  misc_feature 1..119: note = Description of Artificial Sequence: Synthetic polynucleotide
  source 1..119: mol_type = other RNA
tttggtgactgccacgcccagttttagagctagaaatagcaagttaaaataaggctagtccgttatcaacttgaaaaagtggcaccgagtcggtgcgaacatcccttgggcgtggcagt

SEQ ID NO: 2524 - RNA, 119 nt, synthetic construct
  misc_feature 1..119: note = Description of Artificial Sequence: Synthetic polynucleotide
  source 1..119: mol_type = other RNA
tttggtgactgccacgcccagttttagagctagaaatagcaagttaaaataaggctagtccgttatcaacttgaaaaagtggcaccgagtcggtgcgtgaacatccgttgggcgtggca

SEQ ID NO: 2525 - RNA, 119 nt, synthetic construct
  misc_feature 1..119: note = Description of Artificial Sequence: Synthetic polynucleotide
  source 1..119: mol_type = other RNA
tttggtgactgccacgcccagttttagagctagaaatagcaagttaaaataaggctagtccgttatcaacttgaaaaagtggcaccgagtcggtgcgaacatccgttgggcgtggcagt

SEQ ID NO: 2526 - RNA, 119 nt, synthetic construct
  misc_feature 1..119: note = Description of Artificial Sequence: Synthetic polynucleotide
  source 1..119: mol_type = other RNA
tttggtgactgccacgcccagttttagagctagaaatagcaagttaaaataaggctagtccgttatcaacttgaaaaagtggcaccgagtcggtgcacacccgttgggcgtggcagtca

SEQ ID NO: 2527 - RNA, 119 nt, synthetic construct
  misc_feature 1..119: note = Description of Artificial Sequence: Synthetic polynucleotide
  source 1..119: mol_type = other RNA
tttggtgactgccacgcccagttttagagctagaaatagcaagttaaaataaggctagtccgttatcaacttgaaaaagtggcaccgagtcggtgcgaacacccattgggcgtggcagt

SEQ ID NO: 2528 - RNA, 119 nt, synthetic construct
  misc_feature 1..119: note = Description of Artificial Sequence: Synthetic polynucleotide
  source 1..119: mol_type = other RNA
tttggtgactgccacgcccagttttagagctagaaatagcaagttaaaataaggctagtccgttatcaacttgaaaaagtggcaccgagtcggtgcacaccctttgggcgtggcagtca

SEQ ID NO: 2529 - RNA, 119 nt, synthetic construct
  misc_feature 1..119: note = Description of Artificial Sequence: Synthetic polynucleotide
  source 1..119: mol_type = other RNA
tttggtgactgccacgcccagttttagagctagaaatagcaagttaaaataaggctagtccgttatcaacttgaaaaagtggcaccgagtcggtgcagtgaacaccctttgggcgtggc

SEQ ID NO: 2530 - RNA, 119 nt, synthetic construct
  misc_feature 1..119: note = Description of Artificial Sequence: Synthetic polynucleotide
  source 1..119: mol_type = other RNA
tttggtgactgccacgcccagttttagagctagaaatagcaagttaaaataaggctagtccgttatcaacttgaaaaagtggcaccgagtcggtgctgaacacccattgggcgtggcag

SEQ ID NO: 2531 - RNA, 119 nt, synthetic construct
  misc_feature 1..119: note = Description of Artificial Sequence: Synthetic polynucleotide
  source 1..119: mol_type = other RNA
tttggtgactgccacgcccagttttagagctagaaatagcaagttaaaataaggctagtccgttatcaacttgaaaaagtggcaccgagtcggtgcgaacacccgttgggcgtggcagt

SEQ ID NO: 2532 - RNA, 119 nt, synthetic construct
  misc_feature 1..119: note = Description of Artificial Sequence: Synthetic polynucleotide
  source 1..119: mol_type = other RNA
tttggtgactgccacgcccagttttagagctagaaatagcaagttaaaataaggctagtccgttatcaacttgaaaaagtggcaccgagtcggtgctgaacaccccttgggcgtggcag

SEQ ID NO: 2533 - RNA, 119 nt, synthetic construct
  misc_feature 1..119: note = Description of Artificial Sequence: Synthetic polynucleotide
  source 1..119: mol_type = other RNA
tttggtgactgccacgcccagttttagagctagaaatagcaagttaaaataaggctagtccgttatcaacttgaaaaagtggcaccgagtcggtgcgaacaccccttgggcgtggcagt

SEQ ID NO: 2534 - RNA, 119 nt, synthetic construct
  misc_feature 1..119: note = Description of Artificial Sequence: Synthetic polynucleotide
  source 1..119: mol_type = other RNA
tttggtgactgccacgcccagttttagagctagaaatagcaagttaaaataaggctagtccgttatcaacttgaaaaagtggcaccgagtcggtgcaacacccattgggcgtggcagtc

SEQ ID NO: 2535 - RNA, 119 nt, synthetic construct
  misc_feature 1..119: note = Description of Artificial Sequence: Synthetic polynucleotide
  source 1..119: mol_type = other RNA
tttggtgactgccacgcccagttttagagctagaaatagcaagttaaaataaggctagtccgttatcaacttgaaaaagtggcaccgagtcggtgcgtgaacaccctttgggcgtggca

SEQ ID NO: 2536 - RNA, 119 nt, synthetic construct
  misc_feature 1..119: note = Description of Artificial Sequence: Synthetic polynucleotide
  source 1..119: mol_type = other RNA
tttggtgactgccacgcccagttttagagctagaaatagcaagttaaaataaggctagtccgttatcaacttgaaaaagtggcaccgagtcggtgcacatcccttgggcgtggcatttt

SEQ ID NO: 2537 - RNA, 119 nt, synthetic construct
  misc_feature 1..119: note = Description of Artificial Sequence: Synthetic polynucleotide
  source 1..119: mol_type = other RNA
tttggtgactgccacgcccagttttagagctagaaatagcaagttaaaataaggctagtccgttatcaacttgaaaaagtggcaccgagtcggtgcacatccgttgggcgtggcatttt

SEQ ID NO: 2538 - RNA, 119 nt, synthetic construct
  misc_feature 1..119: note = Description of Artificial Sequence: Synthetic polynucleotide
  source 1..119: mol_type = other RNA
tttggtgactgccacgcccagttttagagctagaaatagcaagttaaaataaggctagtccgttatcaacttgaaaaagtggcaccgagtcggtgcagtgaacacccattgggcgtggc

SEQ ID NO: 2539 - RNA, 119 nt, synthetic construct
  misc_feature 1..119: note = Description of Artificial Sequence: Synthetic polynucleotide
  source 1..119: mol_type = other RNA
tttggtgactgccacgcccagttttagagctagaaatagcaagttaaaataaggctagtccgttatcaacttgaaaaagtggcaccgagtcggtgcaacaccccttgggcgtggcagtc

SEQ ID NO: 2540 - RNA, 119 nt, synthetic construct
  misc_feature 1..119: note = Description of Artificial Sequence: Synthetic polynucleotide
  source 1..119: mol_type = other RNA
tttggtgactgccacgcccagttttagagctagaaatagcaagttaaaataaggctagtccgttatcaacttgaaaaagtggcaccgagtcggtgcaacacccgttgggcgtggcagtc

SEQ ID NO: 2541 - RNA, 119 nt, synthetic construct
  misc_feature 1..119: note = Description of Artificial Sequence: Synthetic polynucleotide
  source 1..119: mol_type = other RNA
tttggtgactgccacgcccagttttagagctagaaatagcaagttaaaataaggctagtccgttatcaacttgaaaaagtggcaccgagtcggtgcgtgaacacccattgggcgtggca

SEQ ID NO: 2542 - RNA, 119 nt, synthetic construct
  misc_feature 1..119: note = Description of Artificial Sequence: Synthetic polynucleotide
  source 1..119: mol_type = other RNA
tttggtgactgccacgcccagttttagagctagaaatagcaagttaaaataaggctagtccgttatcaacttgaaaaagtggcaccgagtcggtgcgtgaacatcccttgggcgtggca

SEQ ID NO: 2543 - RNA, 119 nt, synthetic construct
  misc_feature 1..119: note = Description of Artificial Sequence: Synthetic polynucleotide
  source 1..119: mol_type = other RNA
tttggtgactgccacgcccagttttagagctagaaatagcaagttaaaataaggctagtccgttatcaacttgaaaaagtggcaccgagtcggtgctgaacaccctttgggcgtggcag

SEQ ID NO: 2544 - RNA, 119 nt, synthetic construct
  misc_feature 1..119: note = Description of Artificial Sequence: Synthetic polynucleotide
  source 1..119: mol_type = other RNA
tttggtgactgccacgcccagttttagagctagaaatagcaagttaaaataaggctagtccgttatcaacttgaaaaagtggcaccgagtcggtgcacacccattgggcgtggcagtca

SEQ ID NO: 2545 - RNA, 119 nt, synthetic construct
  misc_feature 1..119: note = Description of Artificial Sequence: Synthetic polynucleotide
  source 1..119: mol_type = other RNA
tttggtgactgccacgcccagttttagagctagaaatagcaagttaaaataaggctagtccgttatcaacttgaaaaagtggcaccgagtcggtgcacatccgttgggcgtggcagtca

SEQ ID NO: 2546 - RNA, 119 nt, synthetic construct
  misc_feature 1..119: note = Description of Artificial Sequence: Synthetic polynucleotide
  source 1..119: mol_type = other RNA
tttggtgactgccacgcccagttttagagctagaaatagcaagttaaaataaggctagtccgttatcaacttgaaaaagtggcaccgagtcggtgcgtgaacacccgttgggcgtggca

SEQ ID NO: 2547 - RNA, 119 nt, synthetic construct
  misc_feature 1..119: note = Description of Artificial Sequence: Synthetic polynucleotide
  source 1..119: mol_type = other RNA
tttggtgactgccacgcccagttttagagctagaaatagcaagttaaaataaggctagtccgttatcaacttgaaaaagtggcaccgagtcggtgcacatcccttgggcgtggcagtca

SEQ ID NO: 2548 - RNA, 119 nt, synthetic construct
  misc_feature 1..119: note = Description of Artificial Sequence: Synthetic polynucleotide
  source 1..119: mol_type = other RNA
tttggtgactgccacgcccagttttagagctagaaatagcaagttaaaataaggctagtccgttatcaacttgaaaaagtggcaccgagtcggtgcgtgaacaccccttgggcgtggca

SEQ ID NO: 2549 - RNA, 120 nt, synthetic construct
  misc_feature 1..120: note = Description of Artificial Sequence: Synthetic polynucleotide
  source 1..120: mol_type = other RNA
tttggtgactgccacgcccagttttagagctagaaatagcaagttaaaataaggctagtccgttatcaacttgaaaaagtggcaccgagtcggtgcgaacacccattgggcgtggcagtc

SEQ ID NO: 2550 - RNA, 120 nt, synthetic construct
  misc_feature 1..120: note = Description of Artificial Sequence: Synthetic polynucleotide
  source 1..120: mol_type = other RNA
tttggtgactgccacgcccagttttagagctagaaatagcaagttaaaataaggctagtccgttatcaacttgaaaaagtggcaccgagtcggtgctgaacatccgttgggcgtggcagt

SEQ ID NO: 2551 - RNA, 120 nt, synthetic construct
  misc_feature 1..120: note = Description of Artificial Sequence: Synthetic polynucleotide
  source 1..120: mol_type = other RNA
tttggtgactgccacgcccagttttagagctagaaatagcaagttaaaataaggctagtccgttatcaacttgaaaaagtggcaccgagtcggtgcagtgaacacccattgggcgtggca

SEQ ID NO: 2552 - RNA, 120 nt, synthetic construct
  misc_feature 1..120: note = Description of Artificial Sequence: Synthetic polynucleotide
  source 1..120: mol_type = other RNA
tttggtgactgccacgcccagttttagagctagaaatagcaagttaaaataaggctagtccgttatcaacttgaaaaagtggcaccgagtcggtgcaacatcccttgggcgtggcatttt

SEQ ID NO: 2553 - RNA, 120 nt, synthetic construct
  misc_feature 1..120: note = Description of Artificial Sequence: Synthetic polynucleotide
  source 1..120: mol_type = other RNA
tttggtgactgccacgcccagttttagagctagaaatagcaagttaaaataaggctagtccgttatcaacttgaaaaagtggcaccgagtcggtgctgaacaccctttgggcgtggcagt

SEQ ID NO: 2554 - RNA, 120 nt, synthetic construct
  misc_feature 1..120: note = Description of Artificial Sequence: Synthetic polynucleotide
  source 1..120: mol_type = other RNA
tttggtgactgccacgcccagttttagagctagaaatagcaagttaaaataaggctagtccgttatcaacttgaaaaagtggcaccgagtcggtgcaacacccgttgggcgtggcagtca

SEQ ID NO: 2555 - RNA, 120 nt, synthetic construct
  misc_feature 1..120: note = Description of Artificial Sequence: Synthetic polynucleotide
  source 1..120: mol_type = other RNA
tttggtgactgccacgcccagttttagagctagaaatagcaagttaaaataaggctagtccgttatcaacttgaaaaagtggcaccgagtcggtgcacacccattgggcgtggcagtcac

SEQ ID NO: 2556 - RNA, 120 nt, synthetic construct
  misc_feature 1..120: note = Description of Artificial Sequence: Synthetic polynucleotide
  source 1..120: mol_type = other RNA
tttggtgactgccacgcccagttttagagctagaaatagcaagttaaaataaggctagtccgttatcaacttgaaaaagtggcaccgagtcggtgcacaccctttgggcgtggcagtcac

SEQ ID NO: 2557 - RNA, 120 nt, synthetic construct
  misc_feature 1..120: note = Description of Artificial Sequence: Synthetic polynucleotide
  source 1..120: mol_type = other RNA
tttggtgactgccacgcccagttttagagctagaaatagcaagttaaaataaggctagtccgttatcaacttgaaaaagtggcaccgagtcggtgcagtgaacaccccttgggcgtggca

SEQ ID NO: 2558 - RNA, 120 nt, synthetic construct
  misc_feature 1..120: note = Description of Artificial Sequence: Synthetic polynucleotide
  source 1..120: mol_type = other RNA
tttggtgactgccacgcccagttttagagctagaaatagcaagttaaaataaggctagtccgttatcaacttgaaaaagtggcaccgagtcggtgcacacccgttgggcgtggcagtcac

SEQ ID NO: 2559 - RNA, 120 nt, synthetic construct
  misc_feature 1..120: note = Description of Artificial Sequence: Synthetic polynucleotide
  source 1..120: mol_type = other RNA
tttggtgactgccacgcccagttttagagctagaaatagcaagttaaaataaggctagtccgttatcaacttgaaaaagtggcaccgagtcggtgctgaacaccccttgggcgtggcagt

SEQ ID NO: 2560 - RNA, 120 nt, synthetic construct
  misc_feature 1..120: note = Description of Artificial Sequence: Synthetic polynucleotide
  source 1..120: mol_type = other RNA
tttggtgactgccacgcccagttttagagctagaaatagcaagttaaaataaggctagtccgttatcaacttgaaaaagtggcaccgagtcggtgcagtgaacatcccttgggcgtggca

SEQ ID NO: 2561 - RNA, 120 nt, synthetic construct
  misc_feature 1..120: note = Description of Artificial Sequence: Synthetic polynucleotide
  source 1..120: mol_type = other RNA
tttggtgactgccacgcccagttttagagctagaaatagcaagttaaaataaggctagtccgttatcaacttgaaaaagtggcaccgagtcggtgctgaacacccgttgggcgtggcagt

SEQ ID NO: 2562 - RNA, 120 nt, synthetic construct
  misc_feature 1..120: note = Description of Artificial Sequence: Synthetic polynucleotide
  source 1..120: mol_type = other RNA
tttggtgactgccacgcccagttttagagctagaaatagcaagttaaaataaggctagtccgttatcaacttgaaaaagtggcaccgagtcggtgcaacaccctttgggcgtggcagtca

SEQ ID NO: 2563 - RNA, 120 nt, synthetic construct
  misc_feature 1..120: note = Description of Artificial Sequence: Synthetic polynucleotide
  source 1..120: mol_type = other RNA
tttggtgactgccacgcccagttttagagctagaaatagcaagttaaaataaggctagtccgttatcaacttgaaaaagtggcaccgagtcggtgcaacacccattgggcgtggcagtca

SEQ ID NO: 2564 - RNA, 120 nt, synthetic construct
  misc_feature 1..120: note = Description of Artificial Sequence: Synthetic polynucleotide
  source 1..120: mol_type = other RNA
tttggtgactgccacgcccagttttagagctagaaatagcaagttaaaataaggctagtccgttatcaacttgaaaaagtggcaccgagtcggtgcagtgaacaccctttgggcgtggca

SEQ ID NO: 2565 - RNA, 120 nt, synthetic construct
  misc_feature 1..120: note = Description of Artificial Sequence: Synthetic polynucleotide
  source 1..120: mol_type = other RNA
tttggtgactgccacgcccagttttagagctagaaatagcaagttaaaataaggctagtccgttatcaacttgaaaaagtggcaccgagtcggtgcgaacaccccttgggcgtggcagtc

SEQ ID NO: 2566 - RNA, 120 nt, synthetic construct
  misc_feature 1..120: note = Description of Artificial Sequence: Synthetic polynucleotide
  source 1..120: mol_type = other RNA
tttggtgactgccacgcccagttttagagctagaaatagcaagttaaaataaggctagtccgttatcaacttgaaaaagtggcaccgagtcggtgcgtgaacacccgttgggcgtggcag

SEQ ID NO: 2567 - RNA, 120 nt, synthetic construct
  misc_feature 1..120: note = Description of Artificial Sequence: Synthetic polynucleotide
  source 1..120: mol_type = other RNA
tttggtgactgccacgcccagttttagagctagaaatagcaagttaaaataaggctagtccgttatcaacttgaaaaagtggcaccgagtcggtgcgtgaacaccctttgggcgtggcag

SEQ ID NO: 2568 - RNA, 120 nt, synthetic construct
  misc_feature 1..120: note = Description of Artificial Sequence: Synthetic polynucleotide
  source 1..120: mol_type = other RNA
tttggtgactgccacgcccagttttagagctagaaatagcaagttaaaataaggctagtccgttatcaacttgaaaaagtggcaccgagtcggtgcagtgaacacccgttgggcgtggca

SEQ ID NO: 2569 - RNA, 120 nt, synthetic construct
  misc_feature 1..120: note = Description of Artificial Sequence: Synthetic polynucleotide
  source 1..120: mol_type = other RNA
tttggtgactgccacgcccagttttagagctagaaatagcaagttaaaataaggctagtccgttatcaacttgaaaaagtggcaccgagtcggtgcgtgaacaccccttgggcgtggcag

SEQ ID NO: 2570 - RNA, 120 nt, synthetic construct
  misc_feature 1..120: note = Description of Artificial Sequence: Synthetic polynucleotide
  source 1..120: mol_type = other RNA
tttggtgactgccacgcccagttttagagctagaaatagcaagttaaaataaggctagtccgttatcaacttgaaaaagtggcaccgagtcggtgcgtgaacacccattgggcgtggcag

SEQ ID NO: 2571 - RNA, 120 nt, synthetic construct
  misc_feature 1..120: note = Description of Artificial Sequence: Synthetic polynucleotide
  source 1..120: mol_type = other RNA
tttggtgactgccacgcccagttttagagctagaaatagcaagttaaaataaggctagtccgttatcaacttgaaaaagtggcaccgagtcggtgctgaacacccattgggcgtggcagt

SEQ ID NO: 2572 - RNA, 120 nt, synthetic construct
  misc_feature 1..120: note = Description of Artificial Sequence: Synthetic polynucleotide
  source 1..120: mol_type = other RNA
tttggtgactgccacgcccagttttagagctagaaatagcaagttaaaataaggctagtccgttatcaacttgaaaaagtggcaccgagtcggtgcgaacacccgttgggcgtggcagtc

SEQ ID NO: 2573 - RNA, 120 nt, synthetic construct
  misc_feature 1..120: note = Description of Artificial Sequence: Synthetic polynucleotide
  source 1..120: mol_type = other RNA
tttggtgactgccacgcccagttttagagctagaaatagcaagttaaaataaggctagtccgttatcaacttgaaaaagtggcaccgagtcggtgcaacatcccttgggcgtggcagtca

SEQ ID NO: 2574 - RNA, 120 nt, synthetic construct
  misc_feature 1..120: note = Description of Artificial Sequence: Synthetic polynucleotide
  source 1..120: mol_type = other RNA
tttggtgactgccacgcccagttttagagctagaaatagcaagttaaaataaggctagtccgttatcaacttgaaaaagtggcaccgagtcggtgctgaacatcccttgggcgtggcagt

SEQ ID NO: 2575 - RNA, 120 nt, synthetic construct
  misc_feature 1..120: note = Description of Artificial Sequence: Synthetic polynucleotide
  source 1..120: mol_type = other RNA
tttggtgactgccacgcccagttttagagctagaaatagcaagttaaaataaggctagtccgttatcaacttgaaaaagtggcaccgagtcggtgcaacaccccttgggcgtggcagtca

SEQ ID NO: 2576 - RNA, 120 nt, synthetic construct
  misc_feature 1..120: note = Description of Artificial Sequence: Synthetic polynucleotide
  source 1..120: mol_type = other RNA
tttggtgactgccacgcccagttttagagctagaaatagcaagttaaaataaggctagtccgttatcaacttgaaaaagtggcaccgagtcggtgcacaccccttgggcgtggcagtcac

SEQ ID NO: 2577 - RNA, 120 nt, synthetic construct
  misc_feature 1..120: note = Description of Artificial Sequence: Synthetic polynucleotide
  source 1..120: mol_type = other RNA
tttggtgactgccacgcccagttttagagctagaaatagcaagttaaaataaggctagtccgttatcaacttgaaaaagtggcaccgagtcggtgcaacatccgttgggcgtggcagtca

SEQ ID NO: 2578 - RNA, 120 nt, synthetic construct
  misc_feature 1..120: note = Description of Artificial Sequence: Synthetic polynucleotide
  source 1..120: mol_type = other RNA
tttggtgactgccacgcccagttttagagctagaaatagcaagttaaaataaggctagtccgttatcaacttgaaaaagtggcaccgagtcggtgcgaacaccctttgggcgtggcagtc

SEQ ID NO: 2579 - RNA, 120 nt, synthetic construct
  misc_feature 1..120: note = Description of Artificial Sequence: Synthetic polynucleotide
  source 1..120: mol_type = other RNA
tttggtgactgccacgcccagttttagagctagaaatagcaagttaaaataaggctagtccgttatcaacttgaaaaagtggcaccgagtcggtgcaacatccgttgggcgtggcatttt

SEQ ID NO: 2580 - RNA, 120 nt, synthetic construct
  misc_feature 1..120: note = Description of Artificial Sequence: Synthetic polynucleotide
  source 1..120: mol_type = other RNA
tttggtgactgccacgcccagttttagagctagaaatagcaagttaaaataaggctagtccgttatcaacttgaaaaagtggcaccgagtcggtgcagtgaacatccgttgggcgtggca

SEQ ID NO: 2581 - RNA, 121 nt, synthetic construct
  misc_feature 1..121: note = Description of Artificial Sequence: Synthetic polynucleotide
  source 1..121: mol_type = other RNA
tttggtgactgccacgcccagttttagagctagaaatagcaagttaaaataaggctagtccgttatcaacttgaaaaagtggcaccgagtcggtgcacatcccttgggcgtggcagttttt

SEQ ID NO: 2582 - RNA, 121 nt, synthetic construct
  misc_feature 1..121: note = Description of Artificial Sequence: Synthetic polynucleotide
  source 1..121: mol_type = other RNA
tttggtgactgccacgcccagttttagagctagaaatagcaagttaaaataaggctagtccgttatcaacttgaaaaagtggcaccgagtcggtgcagtgaacaccccttgggcgtggcag

SEQ ID NO: 2583 - RNA, 121 nt, synthetic construct
  misc_feature 1..121: note = Description of Artificial Sequence: Synthetic polynucleotide
  source 1..121: mol_type = other RNA
tttggtgactgccacgcccagttttagagctagaaatagcaagttaaaataaggctagtccgttatcaacttgaaaaagtggcaccgagtcggtgcgaacatccgttgggcgtggcatttt

SEQ ID NO: 2584 - RNA, 121 nt, synthetic construct
  misc_feature 1..121: note = Description of Artificial Sequence: Synthetic polynucleotide
  source 1..121: mol_type = other RNA
tttggtgactgccacgcccagttttagagctagaaatagcaagttaaaataaggctagtccgttatcaacttgaaaaagtggcaccgagtcggtgcacacccattgggcgtggcagtcacc

SEQ ID NO: 2585 - RNA, 121 nt, synthetic construct
  misc_feature 1..121: note = Description of Artificial Sequence: Synthetic polynucleotide
  source 1..121: mol_type = other RNA
tttggtgactgccacgcccagttttagagctagaaatagcaagttaaaataaggctagtccgttatcaacttgaaaaagtggcaccgagtcggtgcgaacaccccttgggcgtggcagtca

SEQ ID NO: 2586 - RNA, 121 nt, synthetic construct
  misc_feature 1..121: note = Description of Artificial Sequence: Synthetic polynucleotide
  source 1..121: mol_type = other RNA
tttggtgactgccacgcccagttttagagctagaaatagcaagttaaaataaggctagtccgttatcaacttgaaaaagtggcaccgagtcggtgcagtgaacacccgttgggcgtggcag

SEQ ID NO: 2587 - RNA, 121 nt, synthetic construct
  misc_feature 1..121: note = Description of Artificial Sequence: Synthetic polynucleotide
  source 1..121: mol_type = other RNA
tttggtgactgccacgcccagttttagagctagaaatagcaagttaaaataaggctagtccgttatcaacttgaaaaagtggcaccgagtcggtgctgaacacccgttgggcgtggcagtc

SEQ ID NO: 2588 - RNA, 121 nt, synthetic construct
  misc_feature 1..121: note = Description of Artificial Sequence: Synthetic polynucleotide
  source 1..121: mol_type = other RNA
tttggtgactgccacgcccagttttagagctagaaatagcaagttaaaataaggctagtccgttatcaacttgaaaaagtggcaccgagtcggtgcagtgaacaccctttgggcgtggcag

SEQ ID NO: 2589 - RNA, 121 nt, synthetic construct
  misc_feature 1..121: note = Description of Artificial Sequence: Synthetic polynucleotide
  source 1..121: mol_type = other RNA
tttggtgactgccacgcccagttttagagctagaaatagcaagttaaaataaggctagtccgttatcaacttgaaaaagtggcaccgagtcggtgcgaacatccgttgggcgtggcagtca

SEQ ID NO: 2590 - RNA, 121 nt, synthetic construct
  misc_feature 1..121: note = Description of Artificial Sequence: Synthetic polynucleotide
  source 1..121: mol_type = other RNA
tttggtgactgccacgcccagttttagagctagaaatagcaagttaaaataaggctagtccgttatcaacttgaaaaagtggcaccgagtcggtgcgaacacccattgggcgtggcagtca

SEQ ID NO: 2591 - RNA, 121 nt, synthetic construct
  misc_feature 1..121: note = Description of Artificial Sequence: Synthetic polynucleotide
  source 1..121: mol_type = other RNA
tttggtgactgccacgcccagttttagagctagaaatagcaagttaaaataaggctagtccgttatcaacttgaaaaagtggcaccgagtcggtgcacatccgttgggcgtggcagtcacc

SEQ ID NO: 2592 - RNA, 121 nt, synthetic construct
  misc_feature 1..121: note = Description of Artificial Sequence: Synthetic polynucleotide
  source 1..121: mol_type = other RNA
tttggtgactgccacgcccagttttagagctagaaatagcaagttaaaataaggctagtccgttatcaacttgaaaaagtggcaccgagtcggtgctgaacacccattgggcgtggcagtc

SEQ ID NO: 2593 - RNA, 121 nt, synthetic construct
  misc_feature 1..121: note = Description of Artificial Sequence: Synthetic polynucleotide
  source 1..121: mol_type = other RNA
tttggtgactgccacgcccagttttagagctagaaatagcaagttaaaataaggctagtccgttatcaacttgaaaaagtggcaccgagtcggtgcaacaccccttgggcgtggcagtcac

SEQ ID NO: 2594 - RNA, 121 nt, synthetic construct
  misc_feature 1..121: note = Description of Artificial Sequence: Synthetic polynucleotide
  source 1..121: mol_type = other RNA
tttggtgactgccacgcccagttttagagctagaaatagcaagttaaaataaggctagtccgttatcaacttgaaaaagtggcaccgagtcggtgcaacacccgttgggcgtggcagtcac

SEQ ID NO: 2595 - RNA, 121 nt, synthetic construct
  misc_feature 1..121: note = Description of Artificial Sequence: Synthetic polynucleotide
  source 1..121: mol_type = other RNA
tttggtgactgccacgcccagttttagagctagaaatagcaagttaaaataaggctagtccgttatcaacttgaaaaagtggcaccgagtcggtgcacatcccttgggcgtggcagtcacc

SEQ ID NO: 2596 - RNA, 121 nt, synthetic construct
  misc_feature 1..121: note = Description of Artificial Sequence: Synthetic polynucleotide
  source 1..121: mol_type = other RNA
tttggtgactgccacgcccagttttagagctagaaatagcaagttaaaataaggctagtccgttatcaacttgaaaaagtggcaccgagtcggtgcgaacaccctttgggcgtggcagtca

SEQ ID NO: 2597 - RNA, 121 nt, synthetic construct
  misc_feature 1..121: note = Description of Artificial Sequence: Synthetic polynucleotide
  source 1..121: mol_type = other RNA
tttggtgactgccacgcccagttttagagctagaaatagcaagttaaaataaggctagtccgttatcaacttgaaaaagtggcaccgagtcggtgcaacaccctttgggcgtggcagtcac

SEQ ID NO: 2598 - RNA, 121 nt, synthetic construct
  misc_feature 1..121: note = Description of Artificial Sequence: Synthetic polynucleotide
  source 1..121: mol_type = other RNA
tttggtgactgccacgcccagttttagagctagaaatagcaagttaaaataaggctagtccgttatcaacttgaaaaagtggcaccgagtcggtgcgtgaacacccattgggcgtggcagt

SEQ ID NO: 2599 - RNA, 121 nt, synthetic construct
  misc_feature 1..121: note = Description of Artificial Sequence: Synthetic polynucleotide
  source 1..121: mol_type = other RNA
tttggtgactgccacgcccagttttagagctagaaatagcaagttaaaataaggctagtccgttatcaacttgaaaaagtggcaccgagtcggtgcacatccgttgggcgtggcagttttt

SEQ ID NO: 2600 - RNA, 121 nt, synthetic construct
  misc_feature 1..121: note = Description of Artificial Sequence: Synthetic polynucleotide
  source 1..121: mol_type = other RNA
tttggtgactgccacgcccagttttagagctagaaatagcaagttaaaataaggctagtccgttatcaacttgaaaaagtggcaccgagtcggtgcgtgaacatcccttgggcgtggcagt

SEQ ID NO: 2601 - RNA, 121 nt, synthetic construct
  misc_feature 1..121: note = Description of Artificial Sequence: Synthetic polynucleotide
  source 1..121: mol_type = other RNA
tttggtgactgccacgcccagttttagagctagaaatagcaagttaaaataaggctagtccgttatcaacttgaaaaagtggcaccgagtcggtgctgaacaccctttgggcgtggcagtc

SEQ ID NO: 2602 - RNA, 121 nt, synthetic construct
  misc_feature 1..121: note = Description of Artificial Sequence: Synthetic polynucleotide
  source 1..121: mol_type = other RNA
tttggtgactgccacgcccagttttagagctagaaatagcaagttaaaataaggctagtccgttatcaacttgaaaaagtggcaccgagtcggtgcacaccctttgggcgtggcagtcacc

SEQ ID NO: 2603 - RNA, 121 nt, synthetic construct
  misc_feature 1..121: note = Description of Artificial Sequence: Synthetic polynucleotide
  source 1..121: mol_type = other RNA
tttggtgactgccacgcccagttttagagctagaaatagcaagttaaaataaggctagtccgttatcaacttgaaaaagtggcaccgagtcggtgcaacacccattgggcgtggcagtcac

SEQ ID NO: 2604 - RNA, 121 nt, synthetic construct
  misc_feature 1..121: note = Description of Artificial Sequence: Synthetic polynucleotide
  source 1..121: mol_type = other RNA
tttggtgactgccacgcccagttttagagctagaaatagcaagttaaaataaggctagtccgttatcaacttgaaaaagtggcaccgagtcggtgcgaacatcccttgggcgtggcatttt

SEQ ID NO: 2605 - RNA, 121 nt, synthetic construct
  misc_feature 1..121: note = Description of Artificial Sequence: Synthetic polynucleotide
  source 1..121: mol_type = other RNA
tttggtgactgccacgcccagttttagagctagaaatagcaagttaaaataaggctagtccgttatcaacttgaaaaagtggcaccgagtcggtgcgtgaacaccccttgggcgtggcagt

SEQ ID NO: 2606 - RNA, 121 nt, synthetic construct
  misc_feature 1..121: note = Description of Artificial Sequence: Synthetic polynucleotide
  source 1..121: mol_type = other RNA
tttggtgactgccacgcccagttttagagctagaaatagcaagttaaaataaggctagtccgttatcaacttgaaaaagtggcaccgagtcggtgcacaccccttgggcgtggcagtcacc

SEQ ID NO: 2607 - RNA, 121 nt, synthetic construct
  misc_feature 1..121: note = Description of Artificial Sequence: Synthetic polynucleotide
  source 1..121: mol_type = other RNA
tttggtgactgccacgcccagttttagagctagaaatagcaagttaaaataaggctagtccgttatcaacttgaaaaagtggcaccgagtcggtgcgtgaacatccgttgggcgtggcagt

SEQ ID NO: 2608 - RNA, 121 nt, synthetic construct
  misc_feature 1..121: note = Description of Artificial Sequence: Synthetic polynucleotide
  source 1..121: mol_type = other RNA
tttggtgactgccacgcccagttttagagctagaaatagcaagttaaaataaggctagtccgttatcaacttgaaaaagtggcaccgagtcggtgcagtgaacacccattgggcgtggcag

SEQ ID NO: 2609 - RNA, 121 nt, synthetic construct
  misc_feature 1..121: note = Description of Artificial Sequence: Synthetic polynucleotide
  source 1..121: mol_type = other RNA
tttggtgactgccacgcccagttttagagctagaaatagcaagttaaaataaggctagtccgttatcaacttgaaaaagtggcaccgagtcggtgcacacccgttgggcgtggcagtcacc

SEQ ID NO: 2610 - RNA, 121 nt, synthetic construct
  misc_feature 1..121: note = Description of Artificial Sequence: Synthetic polynucleotide
  source 1..121: mol_type = other RNA
tttggtgactgccacgcccagttttagagctagaaatagcaagttaaaataaggctagtccgttatcaacttgaaaaagtggcaccgagtcggtgcgaacacccgttgggcgtggcagtca

SEQ ID NO: 2611 - RNA, 121 nt, synthetic construct
  misc_feature 1..121: note = Description of Artificial Sequence: Synthetic polynucleotide
  source 1..121: mol_type = other RNA
tttggtgactgccacgcccagttttagagctagaaatagcaagttaaaataaggctagtccgttatcaacttgaaaaagtggcaccgagtcggtgcgcagtgaacacccattgggcgtggc

SEQ ID NO: 2612 - RNA, 121 nt, synthetic construct
  misc_feature 1..121: note = Description of Artificial Sequence: Synthetic polynucleotide
  source 1..121: mol_type = other RNA
tttggtgactgccacgcccagttttagagctagaaatagcaagttaaaataaggctagtccgttatcaacttgaaaaagtggcaccgagtcggtgcgcagtgaacaccccttgggcgtggc

SEQ ID NO: 2613 - RNA, 121 nt, synthetic construct
  misc_feature 1..121: note = Description of Artificial Sequence: Synthetic polynucleotide
  source 1..121: mol_type = other RNA
tttggtgactgccacgcccagttttagagctagaaatagcaagttaaaataaggctagtccgttatcaacttgaaaaagtggcaccgagtcggtgctgaacaccccttgggcgtggcagtc

SEQ ID NO: 2614 - RNA, 121 nt, synthetic construct
  misc_feature 1..121: note = Description of Artificial Sequence: Synthetic polynucleotide
  source 1..121: mol_type = other RNA
tttggtgactgccacgcccagttttagagctagaaatagcaagttaaaataaggctagtccgttatcaacttgaaaaagtggcaccgagtcggtgcgcagtgaacaccctttgggcgtggc

SEQ ID NO: 2615 - RNA, 121 nt, synthetic construct
  misc_feature 1..121: note = Description of Artificial Sequence: Synthetic polynucleotide
  source 1..121: mol_type = other RNA
tttggtgactgccacgcccagttttagagctagaaatagcaagttaaaataaggctagtccgttatcaacttgaaaaagtggcaccgagtcggtgcgtgaacacccgttgggcgtggcagt

SEQ ID NO: 2616 - RNA, 121 nt, synthetic construct
  misc_feature 1..121: note = Description of Artificial Sequence: Synthetic polynucleotide
  source 1..121: mol_type = other RNA
tttggtgactgccacgcccagttttagagctagaaatagcaagttaaaataaggctagtccgttatcaacttgaaaaagtggcaccgagtcggtgcgaacatcccttgggcgtggcagtca

SEQ ID NO: 2617 - RNA, 121 nt, synthetic construct
  misc_feature 1..121: note = Description of Artificial Sequence: Synthetic polynucleotide
  source 1..121: mol_type = other RNA
tttggtgactgccacgcccagttttagagctagaaatagcaagttaaaataaggctagtccgttatcaacttgaaaaagtggcaccgagtcggtgcgcagtgaacacccgttgggcgtggc

SEQ ID NO: 2618 - RNA, 121 nt, synthetic construct
  misc_feature 1..121: note = Description of Artificial Sequence: Synthetic polynucleotide
  source 1..121: mol_type = other RNA
tttggtgactgccacgcccagttttagagctagaaatagcaagttaaaataaggctagtccgttatcaacttgaaaaagtggcaccgagtcggtgcgtgaacaccctttgggcgtggcagt

SEQ ID NO: 2619 - RNA, 122 nt, synthetic construct
  misc_feature 1..122: note = Description of Artificial Sequence: Synthetic polynucleotide
  source 1..122: mol_type = other RNA
tttggtgactgccacgcccagttttagagctagaaatagcaagttaaaataaggctagtccgttatcaacttgaaaaagtggcaccgagtcggtgcaacacccattgggcgtggcagtcacc

SEQ ID NO: 2620 - RNA, 122 nt, synthetic construct
  misc_feature 1..122: note = Description of Artificial Sequence: Synthetic polynucleotide
  source 1..122: mol_type = other RNA
tttggtgactgccacgcccagttttagagctagaaatagcaagttaaaataaggctagtccgttatcaacttgaaaaagtggcaccgagtcggtgcgcagtgaacatccgttgggcgtggca

SEQ ID NO: 2621 - RNA, 122 nt, synthetic construct
  misc_feature 1..122: note = Description of Artificial Sequence: Synthetic polynucleotide
  source 1..122: mol_type = other RNA
tttggtgactgccacgcccagttttagagctagaaatagcaagttaaaataaggctagtccgttatcaacttgaaaaagtggcaccgagtcggtgcaacatccgttgggcgtggcagtcacc

SEQ ID NO: 2622 - RNA, 122 nt, synthetic construct
  misc_feature 1..122: note = Description of Artificial Sequence: Synthetic polynucleotide
  source 1..122: mol_type = other RNA
tttggtgactgccacgcccagttttagagctagaaatagcaagttaaaataaggctagtccgttatcaacttgaaaaagtggcaccgagtcggtgcaacatcccttgggcgtggcagttttt

SEQ ID NO: 2623 - RNA, 122 nt, synthetic construct
  misc_feature 1..122: note = Description of Artificial Sequence: Synthetic polynucleotide
  source 1..122: mol_type = other RNA
tttggtgactgccacgcccagttttagagctagaaatagcaagttaaaataaggctagtccgttatcaacttgaaaaagtggcaccgagtcggtgcaacaccccttgggcgtggcagtcacc

SEQ ID NO: 2624 - RNA, 122 nt, synthetic construct
  misc_feature 1..122: note = Description of Artificial Sequence: Synthetic polynucleotide
  source 1..122: mol_type = other RNA
tttggtgactgccacgcccagttttagagctagaaatagcaagttaaaataaggctagtccgttatcaacttgaaaaagtggcaccgagtcggtgcgaacaccctttgggcgtggcagtcac

SEQ ID NO: 2625 - RNA, 122 nt, synthetic construct
  misc_feature 1..122: note = Description of Artificial Sequence: Synthetic polynucleotide
  source 1..122: mol_type = other RNA
gtttggtgactgccacgcccagttttagagctagaaatagcaagttaaaataaggctagtccgttatcaacttgaaaaagtggcaccgagtcggtgcacacccattgggcgtggcatttttt

SEQ ID NO: 2626 - RNA, 122 nt, synthetic construct
  misc_feature 1..122: note = Description of Artificial Sequence: Synthetic polynucleotide
  source 1..122: mol_type = other RNA
gtttggtgactgccacgcccagttttagagctagaaatagcaagttaaaataaggctagtccgttatcaacttgaaaaagtggcaccgagtcggtgcacacccgttgggcgtggcatttttt

SEQ ID NO: 2627 - RNA, 122 nt, synthetic construct
  misc_feature 1..122: note = Description of Artificial Sequence: Synthetic polynucleotide
  source 1..122: mol_type = other RNA
gtttggtgactgccacgcccagttttagagctagaaatagcaagttaaaataaggctagtccgttatcaacttgaaaaagtggcaccgagtcggtgcacaccctttgggcgtggcttttttt

SEQ ID NO: 2628 - RNA, 122 nt, synthetic construct
  misc_feature 1..122: note = Description of Artificial Sequence: Synthetic polynucleotide
  source 1..122: mol_type = other RNA
tttggtgactgccacgcccagttttagagctagaaatagcaagttaaaataaggctagtccgttatcaacttgaaaaagtggcaccgagtcggtgctgaacaccccttgggcgtggcagtca

SEQ ID NO: 2629 - RNA, 122 nt, synthetic construct
  misc_feature 1..122: note = Description of Artificial Sequence: Synthetic polynucleotide
  source 1..122: mol_type = other RNA
tttggtgactgccacgcccagttttagagctagaaatagcaagttaaaataaggctagtccgttatcaacttgaaaaagtggcaccgagtcggtgcagtgaacatccgttgggcgtggcagt

SEQ ID NO: 2630 - RNA, 122 nt, synthetic construct
  misc_feature 1..122: note = Description of Artificial Sequence: Synthetic polynucleotide
  source 1..122: mol_type = other RNA
tttggtgactgccacgcccagttttagagctagaaatagcaagttaaaataaggctagtccgttatcaacttgaaaaagtggcaccgagtcggtgcagtgaacatcccttgggcgtggcagt

SEQ ID NO: 2631 - RNA, 122 nt, synthetic construct
  misc_feature 1..122: note = Description of Artificial Sequence: Synthetic polynucleotide
  source 1..122: mol_type = other RNA
tttggtgactgccacgcccagttttagagctagaaatagcaagttaaaataaggctagtccgttatcaacttgaaaaagtggcaccgagtcggtgcaacatcccttgggcgtggcagtcacc

SEQ ID NO: 2632 - RNA, 122 nt, synthetic construct
  misc_feature 1..122: note = Description of Artificial Sequence: Synthetic polynucleotide
  source 1..122: mol_type = other RNA
tttggtgactgccacgcccagttttagagctagaaatagcaagttaaaataaggctagtccgttatcaacttgaaaaagtggcaccgagtcggtgcagtgaacaccctttgggcgtggcagt

SEQ ID NO: 2633 - RNA, 122 nt, synthetic construct
  misc_feature 1..122: note = Description of Artificial Sequence: Synthetic polynucleotide
  source 1..122: mol_type = other RNA
tttggtgactgccacgcccagttttagagctagaaatagcaagttaaaataaggctagtccgttatcaacttgaaaaagtggcaccgagtcggtgcagtgaacaccccttgggcgtggcagt

SEQ ID NO: 2634 - RNA, 122 nt, synthetic construct
  misc_feature 1..122: note = Description of Artificial Sequence: Synthetic polynucleotide
  source 1..122: mol_type = other RNA
tttggtgactgccacgcccagttttagagctagaaatagcaagttaaaataaggctagtccgttatcaacttgaaaaagtggcaccgagtcggtgcagtgaacacccattgggcgtggcagt

SEQ ID NO: 2635 - RNA, 122 nt, synthetic construct
  misc_feature 1..122: note = Description of Artificial Sequence: Synthetic polynucleotide
  source 1..122: mol_type = other RNA
tttggtgactgccacgcccagttttagagctagaaatagcaagttaaaataaggctagtccgttatcaacttgaaaaagtggcaccgagtcggtgcgcagtgaacaccctttgggcgtggca

SEQ ID NO: 2636 - RNA, 122 nt, synthetic construct
  misc_feature 1..122: note = Description of Artificial Sequence: Synthetic polynucleotide
  source 1..122: mol_type = other RNA
tttggtgactgccacgcccagttttagagctagaaatagcaagttaaaataaggctagtccgttatcaacttgaaaaagtggcaccgagtcggtgcgcagtgaacacccattgggcgtggca

SEQ ID NO: 2637 - RNA, 122 nt, synthetic construct
  misc_feature 1..122: note = Description of Artificial Sequence: Synthetic polynucleotide
  source 1..122: mol_type = other RNA
tttggtgactgccacgcccagttttagagctagaaatagcaagttaaaataaggctagtccgttatcaacttgaaaaagtggcaccgagtcggtgcgcagtgaacaccccttgggcgtggca

SEQ ID NO: 2638 - RNA, 122 nt, synthetic construct
  misc_feature 1..122: note = Description of Artificial Sequence: Synthetic polynucleotide
  source 1..122: mol_type = other RNA
tttggtgactgccacgcccagttttagagctagaaatagcaagttaaaataaggctagtccgttatcaacttgaaaaagtggcaccgagtcggtgcgcagtgaacacccgttgggcgtggca

SEQ ID NO: 2639 - RNA, 122 nt, synthetic construct
  misc_feature 1..122: note = Description of Artificial Sequence: Synthetic polynucleotide
  source 1..122: mol_type = other RNA
gtttggtgactgccacgcccagttttagagctagaaatagcaagttaaaataaggctagtccgttatcaacttgaaaaagtggcaccgagtcggtgcacacccattgggcgtggcttttttt

SEQ ID NO: 2640 - RNA, 122 nt, synthetic construct
  misc_feature 1..122: note = Description of Artificial Sequence: Synthetic polynucleotide
  source 1..122: mol_type = other RNA
gtttggtgactgccacgcccagttttagagctagaaatagcaagttaaaataaggctagtccgttatcaacttgaaaaagtggcaccgagtcggtgcacaccccttgggcgtggcttttttt

SEQ ID NO: 2641 - RNA, 122 nt, synthetic construct
  misc_feature 1..122: note = Description of Artificial Sequence: Synthetic polynucleotide
  source 1..122: mol_type = other RNA
gtttggtgactgccacgcccagttttagagctagaaatagcaagttaaaataaggctagtccgttatcaacttgaaaaagtggcaccgagtcggtgcacaccccttgggcgtggcatttttt

SEQ ID NO: 2642 - RNA, 122 nt, synthetic construct
  misc_feature 1..122: note = Description of Artificial Sequence: Synthetic polynucleotide
  source 1..122: mol_type = other RNA
gtttggtgactgccacgcccagttttagagctagaaatagcaagttaaaataaggctagtccgttatcaacttgaaaaagtggcaccgagtcggtgcacacccgttgggcgtggcttttttt

SEQ ID NO: 2643 - RNA, 122 nt, synthetic construct
  misc_feature 1..122: note = Description of Artificial Sequence: Synthetic polynucleotide
  source 1..122: mol_type = other RNA
tttggtgactgccacgcccagttttagagctagaaatagcaagttaaaataaggctagtccgttatcaacttgaaaaagtggcaccgagtcggtgctgaacacccgttgggcgtggcagtca

SEQ ID NO: 2644 - RNA, 122 nt, synthetic construct
  misc_feature 1..122: note = Description of Artificial Sequence: Synthetic polynucleotide
  source 1..122: mol_type = other RNA
tttggtgactgccacgcccagttttagagctagaaatagcaagttaaaataaggctagtccgttatcaacttgaaaaagtggcaccgagtcggtgctgaacatccgttgggcgtggcatttt

SEQ ID NO: 2645 - RNA, 122 nt, synthetic construct
  misc_feature 1..122: note = Description of Artificial Sequence: Synthetic polynucleotide
  source 1..122: mol_type = other RNA
tttggtgactgccacgcccagttttagagctagaaatagcaagttaaaataaggctagtccgttatcaacttgaaaaagtggcaccgagtcggtgcagtgaacacccgttgggcgtggcagt

SEQ ID NO: 2646 - RNA, 122 nt, synthetic construct
  misc_feature 1..122: note = Description of Artificial Sequence: Synthetic polynucleotide
  source 1..122: mol_type = other RNA
tttggtgactgccacgcccagttttagagctagaaatagcaagttaaaataaggctagtccgttatcaacttgaaaaagtggcaccgagtcggtgctgaacaccctttgggcgtggcagtca

SEQ ID NO: 2647 - RNA, 122 nt, synthetic construct
  misc_feature 1..122: note = Description of Artificial Sequence: Synthetic polynucleotide
  source 1..122: mol_type = other RNA
tttggtgactgccacgcccagttttagagctagaaatagcaagttaaaataaggctagtccgttatcaacttgaaaaagtggcaccgagtcggtgcaacaccctttgggcgtggcagtcacc

SEQ ID NO: 2648 - RNA, 122 nt, synthetic construct
  misc_feature 1..122: note = Description of Artificial Sequence: Synthetic polynucleotide
  source 1..122: mol_type = other RNA
tttggtgactgccacgcccagttttagagctagaaatagcaagttaaaataaggctagtccgttatcaacttgaaaaagtggcaccgagtcggtgcagcagtgaacacccgttgggcgtggc

SEQ ID NO: 2649 - RNA, 122 nt, synthetic construct
  misc_feature 1..122: note = Description of Artificial Sequence: Synthetic polynucleotide
  source 1..122: mol_type = other RNA
tttggtgactgccacgcccagttttagagctagaaatagcaagttaaaataaggctagtccgttatcaacttgaaaaagtggcaccgagtcggtgcgtgaacaccctttgggcgtggcagtc

SEQ ID NO: 2650 - RNA, 122 nt, synthetic construct
  misc_feature 1..122: note = Description of Artificial Sequence: Synthetic polynucleotide
  source 1..122: mol_type = other RNA
tttggtgactgccacgcccagttttagagctagaaatagcaagttaaaataaggctagtccgttatcaacttgaaaaagtggcaccgagtcggtgcgaacacccattgggcgtggcagtcac

SEQ ID NO: 2651 - RNA, 122 nt, synthetic construct
  misc_feature 1..122: note = Description of Artificial Sequence: Synthetic polynucleotide
  source 1..122: mol_type = other RNA
tttggtgactgccacgcccagttttagagctagaaatagcaagttaaaataaggctagtccgttatcaacttgaaaaagtggcaccgagtcggtgcagcagtgaacaccctttgggcgtggc

SEQ ID NO: 2652 - RNA, 122 nt, synthetic construct
  misc_feature 1..122: note = Description of Artificial Sequence: Synthetic polynucleotide
  source 1..122: mol_type = other RNA
tttggtgactgccacgcccagttttagagctagaaatagcaagttaaaataaggctagtccgttatcaacttgaaaaagtggcaccgagtcggtgcgtgaacacccgttgggcgtggcagtc

SEQ ID NO: 2653 - RNA, 122 nt, synthetic construct
  misc_feature 1..122: note = Description of Artificial Sequence: Synthetic polynucleotide
  source 1..122: mol_type = other RNA
tttggtgactgccacgcccagttttagagctagaaatagcaagttaaaataaggctagtccgttatcaacttgaaaaagtggcaccgagtcggtgcgtgaacacccattgggcgtggcagtc

SEQ ID NO: 2654 - RNA, 122 nt, synthetic construct
  misc_feature 1..122: note = Description of Artificial Sequence: Synthetic polynucleotide
  source 1..122: mol_type = other RNA
tttggtgactgccacgcccagttttagagctagaaatagcaagttaaaataaggctagtccgttatcaacttgaaaaagtggcaccgagtcggtgcgaacaccccttgggcgtggcagtcac

SEQ ID NO: 2655 - RNA, 122 nt, synthetic construct
  misc_feature 1..122: note = Description of Artificial Sequence: Synthetic polynucleotide
  source 1..122: mol_type = other RNA
tttggtgactgccacgcccagttttagagctagaaatagcaagttaaaataaggctagtccgttatcaacttgaaaaagtggcaccgagtcggtgcagcagtgaacacccattgggcgtggc

SEQ ID NO: 2656 - RNA, 122 nt, synthetic construct
  misc_feature 1..122: note = Description of Artificial Sequence: Synthetic polynucleotide
  source 1..122: mol_type = other RNA
tttggtgactgccacgcccagttttagagctagaaatagcaagttaaaataaggctagtccgttatcaacttgaaaaagtggcaccgagtcggtgcagcagtgaacaccccttgggcgtggc

SEQ ID NO: 2657 - RNA, 122 nt, synthetic construct
  misc_feature 1..122: note = Description of Artificial Sequence: Synthetic polynucleotide
  source 1..122: mol_type = other RNA
tttggtgactgccacgcccagttttagagctagaaatagcaagttaaaataaggctagtccgttatcaacttgaaaaagtggcaccgagtcggtgcgcagtgaacatcccttgggcgtggca

SEQ ID NO: 2658 - RNA, 122 nt, synthetic construct
  misc_feature 1..122: note = Description of Artificial Sequence: Synthetic polynucleotide
  source 1..122: mol_type = other RNA
tttggtgactgccacgcccagttttagagctagaaatagcaagttaaaataaggctagtccgttatcaacttgaaaaagtggcaccgagtcggtgcgtgaacaccccttgggcgtggcagtc

SEQ ID NO: 2659 - RNA, 122 nt, synthetic construct
  misc_feature 1..122: note = Description of Artificial Sequence: Synthetic polynucleotide
  source 1..122: mol_type = other RNA
tttggtgactgccacgcccagttttagagctagaaatagcaagttaaaataaggctagtccgttatcaacttgaaaaagtggcaccgagtcggtgcgaacacccgttgggcgtggcagtcac

SEQ ID NO: 2660 - RNA, 122 nt, synthetic construct
  misc_feature 1..122: note = Description of Artificial Sequence: Synthetic polynucleotide
  source 1..122: mol_type = other RNA
tttggtgactgccacgcccagttttagagctagaaatagcaagttaaaataaggctagtccgttatcaacttgaaaaagtggcaccgagtcggtgcaacacccgttgggcgtggcagtcacc

SEQ ID NO: 2661 - RNA, 122 nt, synthetic construct
  misc_feature 1..122: note = Description of Artificial Sequence: Synthetic polynucleotide
  source 1..122: mol_type = other RNA
tttggtgactgccacgcccagttttagagctagaaatagcaagttaaaataaggctagtccgttatcaacttgaaaaagtggcaccgagtcggtgcaacatccgttgggcgtggcagttttt

SEQ ID NO: 2662 - RNA, 122 nt, synthetic construct
  misc_feature 1..122: note = Description of Artificial Sequence: Synthetic polynucleotide
  source 1..122: mol_type = other RNA
tttggtgactgccacgcccagttttagagctagaaatagcaagttaaaataaggctagtccgttatcaacttgaaaaagtggcaccgagtcggtgctgaacatcccttgggcgtggcatttt

SEQ ID NO: 2663 - RNA, 122 nt, synthetic construct
  misc_feature 1..122: note = Description of Artificial Sequence: Synthetic polynucleotide
  source 1..122: mol_type = other RNA
tttggtgactgccacgcccagttttagagctagaaatagcaagttaaaataaggctagtccgttatcaacttgaaaaagtggcaccgagtcggtgctgaacatccgttgggcgtggcagtca

SEQ ID NO: 2664 - RNA, 122 nt, synthetic construct
  misc_feature 1..122: note = Description of Artificial Sequence: Synthetic polynucleotide
  source 1..122: mol_type = other RNA
tttggtgactgccacgcccagttttagagctagaaatagcaagttaaaataaggctagtccgttatcaacttgaaaaagtggcaccgagtcggtgctgaacatcccttgggcgtggcagtca

SEQ ID NO: 2665 - RNA, 122 nt, synthetic construct
  misc_feature 1..122: note = Description of Artificial Sequence: Synthetic polynucleotide
  source 1..122: mol_type = other RNA
tttggtgactgccacgcccagttttagagctagaaatagcaagttaaaataaggctagtccgttatcaacttgaaaaagtggcaccgagtcggtgctgaacacccattgggcgtggcagtca

SEQ ID NO: 2666 - RNA, 122 nt, synthetic construct
  misc_feature 1..122: note = Description of Artificial Sequence: Synthetic polynucleotide
  source 1..122: mol_type = other RNA
gtttggtgactgccacgcccagttttagagctagaaatagcaagttaaaataaggctagtccgttatcaacttgaaaaagtggcaccgagtcggtgcacaccctttgggcgtggcatttttt

SEQ ID NO: 2667 - RNA, 123 nt, synthetic construct
  misc_feature 1..123: note = Description of Artificial Sequence: Synthetic polynucleotide
  source 1..123: mol_type = other RNA
tttggtgactgccacgcccagttttagagctagaaatagcaagttaaaataaggctagtccgttatcaacttgaaaaagtggcaccgagtcggtgcgtgaacaccccttgggcgtggcagtca

SEQ ID NO: 2668 - RNA, 123 nt, synthetic construct
  misc_feature 1..123: note = Description of Artificial Sequence: Synthetic polynucleotide
  source 1..123: mol_type = other RNA
tttggtgactgccacgcccagttttagagctagaaatagcaagttaaaataaggctagtccgttatcaacttgaaaaagtggcaccgagtcggtgcgtgaacatcccttgggcgtggcagtca

SEQ ID NO: 2669 - RNA, 123 nt, synthetic construct
  misc_feature 1..123: note = Description of Artificial Sequence: Synthetic polynucleotide
  source 1..123: mol_type = other RNA
tttggtgactgccacgcccagttttagagctagaaatagcaagttaaaataaggctagtccgttatcaacttgaaaaagtggcaccgagtcggtgcagcagtgaacaccctttgggcgtggca

SEQ ID NO: 2670 - RNA, 123 nt, synthetic construct
  misc_feature 1..123: note = Description of Artificial Sequence: Synthetic polynucleotide
  source 1..123: mol_type = other RNA
tttggtgactgccacgcccagttttagagctagaaatagcaagttaaaataaggctagtccgttatcaacttgaaaaagtggcaccgagtcggtgcgaacacccattgggcgtggcagtcacc

SEQ ID NO: 2671 - RNA, 123 nt, synthetic construct
  misc_feature 1..123: note = Description of Artificial Sequence: Synthetic polynucleotide
  source 1..123: mol_type = other RNA
tttggtgactgccacgcccagttttagagctagaaatagcaagttaaaataaggctagtccgttatcaacttgaaaaagtggcaccgagtcggtgcgcagtgaacaccctttgggcgtggcag

SEQ ID NO: 2672 - RNA, 123 nt, synthetic construct
  misc_feature 1..123: note = Description of Artificial Sequence: Synthetic polynucleotide
  source 1..123: mol_type = other RNA
tttggtgactgccacgcccagttttagagctagaaatagcaagttaaaataaggctagtccgttatcaacttgaaaaagtggcaccgagtcggtgcgaacatcccttgggcgtggcagtcacc

SEQ ID NO: 2673 - RNA, 123 nt, synthetic construct
  misc_feature 1..123: note = Description of Artificial Sequence: Synthetic polynucleotide
  source 1..123: mol_type = other RNA
gtttggtgactgccacgcccagttttagagctagaaatagcaagttaaaataaggctagtccgttatcaacttgaaaaagtggcaccgagtcggtgcaacaccccttgggcgtggcatttttt

SEQ ID NO: 2674 - RNA, 123 nt, synthetic construct
  misc_feature 1..123: note = Description of Artificial Sequence: Synthetic polynucleotide
  source 1..123: mol_type = other RNA
tttggtgactgccacgcccagttttagagctagaaatagcaagttaaaataaggctagtccgttatcaacttgaaaaagtggcaccgagtcggtgcgtgaacacccattgggcgtggcagtca

SEQ ID NO: 2675 - RNA, 123 nt, synthetic construct
  misc_feature 1..123: note = Description of Artificial Sequence: Synthetic polynucleotide
  source 1..123: mol_type = other RNA
tttggtgactgccacgcccagttttagagctagaaatagcaagttaaaataaggctagtccgttatcaacttgaaaaagtggcaccgagtcggtgcgaacaccccttgggcgtggcagtcacc

SEQ ID NO: 2676 - RNA, 123 nt, synthetic construct
  misc_feature 1..123: note = Description of Artificial Sequence: Synthetic polynucleotide
  source 1..123: mol_type = other RNA
tttggtgactgccacgcccagttttagagctagaaatagcaagttaaaataaggctagtccgttatcaacttgaaaaagtggcaccgagtcggtgctgaacacccattgggcgtggcagtcac

SEQ ID NO: 2677 - RNA, 123 nt, synthetic construct
  misc_feature 1..123: note = Description of Artificial Sequence: Synthetic polynucleotide
  source 1..123: mol_type = other RNA
tttggtgactgccacgcccagttttagagctagaaatagcaagttaaaataaggctagtccgttatcaacttgaaaaagtggcaccgagtcggtgcgaacaccctttgggcgtggcagtcacc

SEQ ID NO: 2678 - RNA, 123 nt, synthetic construct
  misc_feature 1..123: note = Description of Artificial Sequence: Synthetic polynucleotide
  source 1..123: mol_type = other RNA
tttggtgactgccacgcccagttttagagctagaaatagcaagttaaaataaggctagtccgttatcaacttgaaaaagtggcaccgagtcggtgcagtgaacaccccttgggcgtggcagtc

SEQ ID NO: 2679 - RNA, 123 nt, synthetic construct
  misc_feature 1..123: note = Description of Artificial Sequence: Synthetic polynucleotide
  source 1..123: mol_type = other RNA
gtttggtgactgccacgcccagttttagagctagaaatagcaagttaaaataaggctagtccgttatcaacttgaaaaagtggcaccgagtcggtgcaacacccattgggcgtggcttttttt

SEQ ID NO: 2680 - RNA, 123 nt, synthetic construct
  misc_feature 1..123: note = Description of Artificial Sequence: Synthetic polynucleotide
  source 1..123: mol_type = other RNA
tttggtgactgccacgcccagttttagagctagaaatagcaagttaaaataaggctagtccgttatcaacttgaaaaagtggcaccgagtcggtgcacacccgttgggcgtggcagtcaccaa

SEQ ID NO: 2681 - RNA, 123 nt, synthetic construct
  misc_feature 1..123: note = Description of Artificial Sequence: Synthetic polynucleotide
  source 1..123: mol_type = other RNA
tttggtgactgccacgcccagttttagagctagaaatagcaagttaaaataaggctagtccgttatcaacttgaaaaagtggcaccgagtcggtgcgaacatccgttgggcgtggcagtcacc

SEQ ID NO: 2682 - RNA, 123 nt, synthetic construct
  misc_feature 1..123: note = Description of Artificial Sequence: Synthetic polynucleotide
  source 1..123: mol_type = other RNA
tttggtgactgccacgcccagttttagagctagaaatagcaagttaaaataaggctagtccgttatcaacttgaaaaagtggcaccgagtcggtgcgaacatccgttgggcgtggcagttttt

SEQ ID NO: 2683 - RNA, 123 nt, synthetic construct
  misc_feature 1..123: note = Description of Artificial Sequence: Synthetic polynucleotide
  source 1..123: mol_type = other RNA
tttggtgactgccacgcccagttttagagctagaaatagcaagttaaaataaggctagtccgttatcaacttgaaaaagtggcaccgagtcggtgcacaccccttgggcgtggcagtcaccaa

SEQ ID NO: 2684 - RNA, 123 nt, synthetic construct
  misc_feature 1..123: note = Description of Artificial Sequence: Synthetic polynucleotide
  source 1..123: mol_type = other RNA
gtttggtgactgccacgcccagttttagagctagaaatagcaagttaaaataaggctagtccgttatcaacttgaaaaagtggcaccgagtcggtgcacacccattgggcgtggcattttttt

SEQ ID NO: 2685 - RNA, 123 nt, synthetic construct
  misc_feature 1..123: note = Description of Artificial Sequence: Synthetic polynucleotide
  source 1..123: mol_type = other RNA
tttggtgactgccacgcccagttttagagctagaaatagcaagttaaaataaggctagtccgttatcaacttgaaaaagtggcaccgagtcggtgcgaacacccgttgggcgtggcagtcacc

SEQ ID NO: 2686 - RNA, 123 nt, synthetic construct
  misc_feature 1..123: note = Description of Artificial Sequence: Synthetic polynucleotide
  source 1..123: mol_type = other RNA
tttggtgactgccacgcccagttttagagctagaaatagcaagttaaaataaggctagtccgttatcaacttgaaaaagtggcaccgagtcggtgcgtgaacatccgttgggcgtggcatttt

SEQ ID NO: 2687 - RNA, 123 nt, synthetic construct
  misc_feature 1..123: note = Description of Artificial Sequence: Synthetic polynucleotide
  source 1..123: mol_type = other RNA
tttggtgactgccacgcccagttttagagctagaaatagcaagttaaaataaggctagtccgttatcaacttgaaaaagtggcaccgagtcggtgcgcagtgaacaccccttgggcgtggcag

SEQ ID NO: 2688 - RNA, 123 nt, synthetic construct
  misc_feature 1..123: note = Description of Artificial Sequence: Synthetic polynucleotide
  source 1..123: mol_type = other RNA
tttggtgactgccacgcccagttttagagctagaaatagcaagttaaaataaggctagtccgttatcaacttgaaaaagtggcaccgagtcggtgcgcagtgaacacccattgggcgtggcag

SEQ ID NO: 2689 - RNA, 123 nt, synthetic construct
  misc_feature 1..123: note = Description of Artificial Sequence: Synthetic polynucleotide
  source 1..123: mol_type = other RNA
tttggtgactgccacgcccagttttagagctagaaatagcaagttaaaataaggctagtccgttatcaacttgaaaaagtggcaccgagtcggtgcagcagtgaacaccccttgggcgtggca

SEQ ID NO: 2690 - RNA, 123 nt, synthetic construct
  misc_feature 1..123: note = Description of Artificial Sequence: Synthetic polynucleotide
  source 1..123: mol_type = other RNA
tttggtgactgccacgcccagttttagagctagaaatagcaagttaaaataaggctagtccgttatcaacttgaaaaagtggcaccgagtcggtgcagcagtgaacacccgttgggcgtggca

SEQ ID NO: 2691 - RNA, 123 nt, synthetic construct
  misc_feature 1..123: note = Description of Artificial Sequence: Synthetic polynucleotide
  source 1..123: mol_type = other RNA
tttggtgactgccacgcccagttttagagctagaaatagcaagttaaaataaggctagtccgttatcaacttgaaaaagtggcaccgagtcggtgcacatcccttgggcgtggcagtcatttt

SEQ ID NO: 2692 - RNA, 123 nt, synthetic construct
  misc_feature 1..123: note = Description of Artificial Sequence: Synthetic polynucleotide
  source 1..123: mol_type = other RNA
tttggtgactgccacgcccagttttagagctagaaatagcaagttaaaataaggctagtccgttatcaacttgaaaaagtggcaccgagtcggtgcacatcccttgggcgtggcagtcaccaa

SEQ ID NO: 2693 - RNA, 123 nt, synthetic construct
  misc_feature 1..123: note = Description of Artificial Sequence: Synthetic polynucleotide
  source 1..123: mol_type = other RNA
tttggtgactgccacgcccagttttagagctagaaatagcaagttaaaataaggctagtccgttatcaacttgaaaaagtggcaccgagtcggtgcgaacatcccttgggcgtggcagttttt

SEQ ID NO: 2694 - RNA, 123 nt, synthetic construct
  misc_feature 1..123: note = Description of Artificial Sequence: Synthetic polynucleotide
  source 1..123: mol_type = other RNA
tttggtgactgccacgcccagttttagagctagaaatagcaagttaaaataaggctagtccgttatcaacttgaaaaagtggcaccgagtcggtgcacatccgttgggcgtggcagtcaccaa

SEQ ID NO: 2695 - RNA, 123 nt, synthetic construct
  misc_feature 1..123: note = Description of Artificial Sequence: Synthetic polynucleotide
  source 1..123: mol_type = other RNA
tttggtgactgccacgcccagttttagagctagaaatagcaagttaaaataaggctagtccgttatcaacttgaaaaagtggcaccgagtcggtgcagtgaacacccgttgggcgtggcagtc

SEQ ID NO: 2696 - RNA, 123 nt, synthetic construct
  misc_feature 1..123: note = Description of Artificial Sequence: Synthetic polynucleotide
  source 1..123: mol_type = other RNA
tttggtgactgccacgcccagttttagagctagaaatagcaagttaaaataaggctagtccgttatcaacttgaaaaagtggcaccgagtcggtgctgaacaccccttgggcgtggcagtcac

SEQ ID NO: 2697 - RNA, 123 nt, synthetic construct
  misc_feature 1..123: note = Description of Artificial Sequence: Synthetic polynucleotide
  source 1..123: mol_type = other RNA
tttggtgactgccacgcccagttttagagctagaaatagcaagttaaaataaggctagtccgttatcaacttgaaaaagtggcaccgagtcggtgctgaacacccgttgggcgtggcagtcac

SEQ ID NO: 2698 - RNA, 123 nt, synthetic construct
  misc_feature 1..123: note = Description of Artificial Sequence: Synthetic polynucleotide
  source 1..123: mol_type = other RNA
tttggtgactgccacgcccagttttagagctagaaatagcaagttaaaataaggctagtccgttatcaacttgaaaaagtggcaccgagtcggtgcgtgaacatcccttgggcgtggcatttt

SEQ ID NO: 2699 - RNA, 123 nt, synthetic construct
  misc_feature 1..123: note = Description of Artificial Sequence: Synthetic polynucleotide
  source 1..123: mol_type = other RNA
tttggtgactgccacgcccagttttagagctagaaatagcaagttaaaataaggctagtccgttatcaacttgaaaaagtggcaccgagtcggtgcgtgaacaccctttgggcgtggcagtca

SEQ ID NO: 2700 - RNA, 123 nt, synthetic construct
  misc_feature 1..123: note = Description of Artificial Sequence: Synthetic polynucleotide
  source 1..123: mol_type = other RNA
gtttggtgactgccacgcccagttttagagctagaaatagcaagttaaaataaggctagtccgttatcaacttgaaaaagtggcaccgagtcggtgcaacaccccttgggcgtggcttttttt

SEQ ID NO: 2701 - RNA, 123 nt, synthetic construct
  misc_feature 1..123: note = Description of Artificial Sequence: Synthetic polynucleotide
  source 1..123: mol_type = other RNA
tttggtgactgccacgcccagttttagagctagaaatagcaagttaaaataaggctagtccgttatcaacttgaaaaagtggcaccgagtcggtgcgtgaacacccgttgggcgtggcagtca

SEQ ID NO: 2702 - RNA, 123 nt, synthetic construct
  misc_feature 1..123: note = Description of Artificial Sequence: Synthetic polynucleotide
  source 1..123: mol_type = other RNA
tttggtgactgccacgcccagttttagagctagaaatagcaagttaaaataaggctagtccgttatcaacttgaaaaagtggcaccgagtcggtgcacacccattgggcgtggcagtcaccaa

SEQ ID NO: 2703 - RNA, 123 nt, synthetic construct
  misc_feature 1..123: note = Description of Artificial Sequence: Synthetic polynucleotide
  source 1..123: mol_type = other RNA
gtttggtgactgccacgcccagttttagagctagaaatagcaagttaaaataaggctagtccgttatcaacttgaaaaagtggcaccgagtcggtgcaacacccgttgggcgtggcttttttt

SEQ ID NO: 2704 - RNA, 123 nt, synthetic construct
  misc_feature 1..123: note = Description of Artificial Sequence: Synthetic polynucleotide
  source 1..123: mol_type = other RNA
tttggtgactgccacgcccagttttagagctagaaatagcaagttaaaataaggctagtccgttatcaacttgaaaaagtggcaccgagtcggtgcagcagtgaacatccgttgggcgtggca

SEQ ID NO: 2705 - RNA, 123 nt, synthetic construct
  misc_feature 1..123: note = Description of Artificial Sequence: Synthetic polynucleotide
  source 1..123: mol_type = other RNA
gtttggtgactgccacgcccagttttagagctagaaatagcaagttaaaataaggctagtccgttatcaacttgaaaaagtggcaccgagtcggtgcaacaccctttgggcgtggcttttttt

SEQ ID NO: 2706 - RNA, 123 nt, synthetic construct
  misc_feature 1..123: note = Description of Artificial Sequence: Synthetic polynucleotide
  source 1..123: mol_type = other RNA
tttggtgactgccacgcccagttttagagctagaaatagcaagttaaaataaggctagtccgttatcaacttgaaaaagtggcaccgagtcggtgcagcagtgaacacccattgggcgtggca

SEQ ID NO: 2707 - RNA, 123 nt, synthetic construct
  misc_feature 1..123: note = Description of Artificial Sequence: Synthetic polynucleotide
  source 1..123: mol_type = other RNA
gtttggtgactgccacgcccagttttagagctagaaatagcaagttaaaataaggctagtccgttatcaacttgaaaaagtggcaccgagtcggtgcaacacccattgggcgtggcatttttt

SEQ ID NO: 2708 - RNA, 123 nt, synthetic construct
  misc_feature 1..123: note = Description of Artificial Sequence: Synthetic polynucleotide
  source 1..123: mol_type = other RNA
tttggtgactgccacgcccagttttagagctagaaatagcaagttaaaataaggctagtccgttatcaacttgaaaaagtggcaccgagtcggtgcagtgaacaccctttgggcgtggcagtc

SEQ ID NO: 2709 - RNA, 123 nt, synthetic construct
  misc_feature 1..123: note = Description of Artificial Sequence: Synthetic polynucleotide
  source 1..123: mol_type = other RNA
gtttggtgactgccacgcccagttttagagctagaaatagcaagttaaaataaggctagtccgttatcaacttgaaaaagtggcaccgagtcggtgcacaccctttgggcgtggcattttttt

SEQ ID NO: 2710 - RNA, 123 nt, synthetic construct
  misc_feature 1..123: note = Description of Artificial Sequence: Synthetic polynucleotide
  source 1..123: mol_type = other RNA
tttggtgactgccacgcccagttttagagctagaaatagcaagttaaaataaggctagtccgttatcaacttgaaaaagtggcaccgagtcggtgcacatccgttgggcgtggcagtcatttt

SEQ ID NO: 2711 - RNA, 123 nt, synthetic construct
  misc_feature 1..123: note = Description of Artificial Sequence: Synthetic polynucleotide
  source 1..123: mol_type = other RNA
tttggtgactgccacgcccagttttagagctagaaatagcaagttaaaataaggctagtccgttatcaacttgaaaaagtggcaccgagtcggtgcacaccctttgggcgtggcagtcaccaa

SEQ ID NO: 2712 - RNA, 123 nt, synthetic construct
  misc_feature 1..123: note = Description of Artificial Sequence: Synthetic polynucleotide
  source 1..123: mol_type = other RNA
gtttggtgactgccacgcccagttttagagctagaaatagcaagttaaaataaggctagtccgttatcaacttgaaaaagtggcaccgagtcggtgcaacaccctttgggcgtggcatttttt

SEQ ID NO: 2713 - RNA, 123 nt, synthetic construct
  misc_feature 1..123: note = Description of Artificial Sequence: Synthetic polynucleotide
  source 1..123: mol_type = other RNA
tttggtgactgccacgcccagttttagagctagaaatagcaagttaaaataaggctagtccgttatcaacttgaaaaagtggcaccgagtcggtgcagtgaacacccattgggcgtggcagtc

SEQ ID NO: 2714 - RNA, 123 nt, synthetic construct
  misc_feature 1..123: note = Description of Artificial Sequence: Synthetic polynucleotide
  source 1..123: mol_type = other RNA
gtttggtgactgccacgcccagttttagagctagaaatagcaagttaaaataaggctagtccgttatcaacttgaaaaagtggcaccgagtcggtgcaacacccgttgggcgtggcatttttt

SEQ ID NO: 2715 - RNA, 123 nt, synthetic construct
  misc_feature 1..123: note = Description of Artificial Sequence: Synthetic polynucleotide
  source 1..123: mol_type = other RNA
tttggtgactgccacgcccagttttagagctagaaatagcaagttaaaataaggctagtccgttatcaacttgaaaaagtggcaccgagtcggtgctgaacaccctttgggcgtggcagtcac

SEQ ID NO: 2716 - RNA, 123 nt, synthetic construct
  misc_feature 1..123: note = Description of Artificial Sequence: Synthetic polynucleotide
  source 1..123: mol_type = other RNA
tttggtgactgccacgcccagttttagagctagaaatagcaagttaaaataaggctagtccgttatcaacttgaaaaagtggcaccgagtcggtgcagcagtgaacatcccttgggcgtggca

SEQ ID NO: 2717 - RNA, 123 nt, synthetic construct
  misc_feature 1..123: note = Description of Artificial Sequence: Synthetic polynucleotide
  source 1..123: mol_type = other RNA
tttggtgactgccacgcccagttttagagctagaaatagcaagttaaaataaggctagtccgttatcaacttgaaaaagtggcaccgagtcggtgcgtgaacatccgttgggcgtggcagtca

SEQ ID NO: 2718 - RNA, 123 nt, synthetic construct
  misc_feature 1..123: note = Description of Artificial Sequence: Synthetic polynucleotide
  source 1..123: mol_type = other RNA
gtttggtgactgccacgcccagttttagagctagaaatagcaagttaaaataaggctagtccgttatcaacttgaaaaagtggcaccgagtcggtgcacacccgttgggcgtggcattttttt

SEQ ID NO: 2719 - RNA, 123 nt, synthetic construct
  misc_feature 1..123: note = Description of Artificial Sequence: Synthetic polynucleotide
  source 1..123: mol_type = other RNA
gtttggtgactgccacgcccagttttagagctagaaatagcaagttaaaataaggctagtccgttatcaacttgaaaaagtggcaccgagtcggtgcacaccccttgggcgtggcattttttt

SEQ ID NO: 2720 - RNA, 123 nt, synthetic construct
  misc_feature 1..123: note = Description of Artificial Sequence: Synthetic polynucleotide
  source 1..123: mol_type = other RNA
tttggtgactgccacgcccagttttagagctagaaatagcaagttaaaataaggctagtccgttatcaacttgaaaaagtggcaccgagtcggtgcgcagtgaacacccgttgggcgtggcag

SEQ ID NO: 2721 - RNA, 124 nt, synthetic construct
  misc_feature 1..124: note = Description of Artificial Sequence: Synthetic polynucleotide
  source 1..124: mol_type = other RNA
tttggtgactgccacgcccagttttagagctagaaatagcaagttaaaataaggctagtccgttatcaacttgaaaaagtggcaccgagtcggtgcagcagtgaacaccccttgggcgtggcag

SEQ ID NO: 2722 - RNA, 124 nt, synthetic construct
  misc_feature 1..124: note = Description of Artificial Sequence: Synthetic polynucleotide
  source 1..124: mol_type = other RNA
tttggtgactgccacgcccagttttagagctagaaatagcaagttaaaataaggctagtccgttatcaacttgaaaaagtggcaccgagtcggtgcgtgaacacccattgggcgtggcagtcac

SEQ ID NO: 2723 - RNA, 124 nt, synthetic construct
  misc_feature 1..124: note = Description of Artificial Sequence: Synthetic polynucleotide
  source 1..124: mol_type = other RNA
tttggtgactgccacgcccagttttagagctagaaatagcaagttaaaataaggctagtccgttatcaacttgaaaaagtggcaccgagtcggtgcagcagtgaacacccgttgggcgtggcag

SEQ ID NO: 2724 - RNA, 124 nt, synthetic construct
  misc_feature 1..124: note = Description of Artificial Sequence: Synthetic polynucleotide
  source 1..124: mol_type = other RNA
gtttggtgactgccacgcccagttttagagctagaaatagcaagttaaaataaggctagtccgttatcaacttgaaaaagtggcaccgagtcggtgcaacacccattgggcgtggcattttttt

SEQ ID NO: 2725 - RNA, 124 nt, synthetic construct
  misc_feature 1..124: note = Description of Artificial Sequence: Synthetic polynucleotide
  source 1..124: mol_type = other RNA
tttggtgactgccacgcccagttttagagctagaaatagcaagttaaaataaggctagtccgttatcaacttgaaaaagtggcaccgagtcggtgcgtgaacacccgttgggcgtggcagtcac

SEQ ID NO: 2726 - RNA, 124 nt, synthetic construct
  misc_feature 1..124: note = Description of Artificial Sequence: Synthetic polynucleotide
  source 1..124: mol_type = other RNA
tttggtgactgccacgcccagttttagagctagaaatagcaagttaaaataaggctagtccgttatcaacttgaaaaagtggcaccgagtcggtgcgtgaacaccctttgggcgtggcagtcac

SEQ ID NO: 2727 - RNA, 124 nt, synthetic construct
  misc_feature 1..124: note = Description of Artificial Sequence: Synthetic polynucleotide
  source 1..124: mol_type = other RNA
tttggtgactgccacgcccagttttagagctagaaatagcaagttaaaataaggctagtccgttatcaacttgaaaaagtggcaccgagtcggtgcagcagtgaacaccctttgggcgtggcag

SEQ ID NO: 2728 - RNA, 124 nt, synthetic construct
  misc_feature 1..124: note = Description of Artificial Sequence: Synthetic polynucleotide
  source 1..124: mol_type = other RNA
tttggtgactgccacgcccagttttagagctagaaatagcaagttaaaataaggctagtccgttatcaacttgaaaaagtggcaccgagtcggtgcagcagtgaacacccattgggcgtggcag

SEQ ID NO: 2729 - RNA, 124 nt, synthetic construct
  misc_feature 1..124: note = Description of Artificial Sequence: Synthetic polynucleotide
  source 1..124: mol_type = other RNA
tttggtgactgccacgcccagttttagagctagaaatagcaagttaaaataaggctagtccgttatcaacttgaaaaagtggcaccgagtcggtgctgaacaccccttgggcgtggcagtcacc

SEQ ID NO: 2730 - RNA, 124 nt, synthetic construct
  misc_feature 1..124: note = Description of Artificial Sequence: Synthetic polynucleotide
  source 1..124: mol_type = other RNA
tttggtgactgccacgcccagttttagagctagaaatagcaagttaaaataaggctagtccgttatcaacttgaaaaagtggcaccgagtcggtgctgaacacccattgggcgtggcagtcacc

SEQ ID NO: 2731 - RNA, 124 nt, synthetic construct
  misc_feature 1..124: note = Description of Artificial Sequence: Synthetic polynucleotide
  source 1..124: mol_type = other RNA
gtttggtgactgccacgcccagttttagagctagaaatagcaagttaaaataaggctagtccgttatcaacttgaaaaagtggcaccgagtcggtgcacacccgttgggcgtggcagttttttt

SEQ ID NO: 2732 - RNA, 124 nt, synthetic construct
  misc_feature 1..124: note = Description of Artificial Sequence: Synthetic polynucleotide
  source 1..124: mol_type = other RNA
gtttggtgactgccacgcccagttttagagctagaaatagcaagttaaaataaggctagtccgttatcaacttgaaaaagtggcaccgagtcggtgcaacaccccttgggcgtggcattttttt

SEQ ID NO: 2733 - RNA, 124 nt, synthetic construct
  misc_feature 1..124: note = Description of Artificial Sequence: Synthetic polynucleotide
  source 1..124: mol_type = other RNA
tttggtgactgccacgcccagttttagagctagaaatagcaagttaaaataaggctagtccgttatcaacttgaaaaagtggcaccgagtcggtgcagtgaacacccattgggcgtggcagtca

SEQ ID NO: 2734 - RNA, 124 nt, synthetic construct
  misc_feature 1..124: note = Description of Artificial Sequence: Synthetic polynucleotide
  source 1..124: mol_type = other RNA
tttggtgactgccacgcccagttttagagctagaaatagcaagttaaaataaggctagtccgttatcaacttgaaaaagtggcaccgagtcggtgcagtgaacaccctttgggcgtggcagtca

SEQ ID NO: 2735 - RNA, 124 nt, synthetic construct
  misc_feature 1..124: note = Description of Artificial Sequence: Synthetic polynucleotide
  source 1..124: mol_type = other RNA
tttggtgactgccacgcccagttttagagctagaaatagcaagttaaaataaggctagtccgttatcaacttgaaaaagtggcaccgagtcggtgcagtgaacacccgttgggcgtggcagtca

SEQ ID NO: 2736 - RNA, 124 nt, synthetic construct
  misc_feature 1..124: note = Description of Artificial Sequence: Synthetic polynucleotide
  source 1..124: mol_type = other RNA
gtttggtgactgccacgcccagttttagagctagaaatagcaagttaaaataaggctagtccgttatcaacttgaaaaagtggcaccgagtcggtgcaacaccctttgggcgtggcattttttt

SEQ ID NO: 2737 - RNA, 124 nt, synthetic construct
  misc_feature 1..124: note = Description of Artificial Sequence: Synthetic polynucleotide
  source 1..124: mol_type = other RNA
gtttggtgactgccacgcccagttttagagctagaaatagcaagttaaaataaggctagtccgttatcaacttgaaaaagtggcaccgagtcggtgcaacacccgttgggcgtggcattttttt

SEQ ID NO: 2738 - RNA, 124 nt, synthetic construct
  misc_feature 1..124: note = Description of Artificial Sequence: Synthetic polynucleotide
  source 1..124: mol_type = other RNA
tttggtgactgccacgcccagttttagagctagaaatagcaagttaaaataaggctagtccgttatcaacttgaaaaagtggcaccgagtcggtgcagtgaacatcccttgggcgtggcatttt

SEQ ID NO: 2739 - RNA, 124 nt, synthetic construct
  misc_feature 1..124: note = Description of Artificial Sequence: Synthetic polynucleotide
  source 1..124: mol_type = other RNA
tttggtgactgccacgcccagttttagagctagaaatagcaagttaaaataaggctagtccgttatcaacttgaaaaagtggcaccgagtcggtgcagtgaacaccccttgggcgtggcatttt

SEQ ID NO: 2740 - RNA, 124 nt, synthetic construct
  misc_feature 1..124: note = Description of Artificial Sequence: Synthetic polynucleotide
  source 1..124: mol_type = other RNA
gtttggtgactgccacgcccagttttagagctagaaatagcaagttaaaataaggctagtccgttatcaacttgaaaaagtggcaccgagtcggtgcgaacacccgttgggcgtggcttttttt

SEQ ID NO: 2741 - RNA, 124 nt, synthetic construct
  misc_feature 1..124: note = Description of Artificial Sequence: Synthetic polynucleotide
  source 1..124: mol_type = other RNA
gtttggtgactgccacgcccagttttagagctagaaatagcaagttaaaataaggctagtccgttatcaacttgaaaaagtggcaccgagtcggtgcgaacacccgttgggcgtggcatttttt

SEQ ID NO: 2742 - RNA, 124 nt, synthetic construct
  misc_feature 1..124: note = Description of Artificial Sequence: Synthetic polynucleotide
  source 1..124: mol_type = other RNA
gtttggtgactgccacgcccagttttagagctagaaatagcaagttaaaataaggctagtccgttatcaacttgaaaaagtggcaccgagtcggtgcgaacaccccttgggcgtggcttttttt

SEQ ID NO: 2743 - RNA, 124 nt, synthetic construct
  misc_feature 1..124: note = Description of Artificial Sequence: Synthetic polynucleotide
  source 1..124: mol_type = other RNA
gtttggtgactgccacgcccagttttagagctagaaatagcaagttaaaataaggctagtccgttatcaacttgaaaaagtggcaccgagtcggtgcacacccattgggcgtggcagttttttt

SEQ ID NO: 2744 - RNA, 124 nt, synthetic construct
  misc_feature 1..124: note = Description of Artificial Sequence: Synthetic polynucleotide
  source 1..124: mol_type = other RNA
tttggtgactgccacgcccagttttagagctagaaatagcaagttaaaataaggctagtccgttatcaacttgaaaaagtggcaccgagtcggtgcagtgaacaccccttgggcgtggcagtca

SEQ ID NO: 2745 - RNA, 124 nt, synthetic construct
  misc_feature 1..124: note = Description of Artificial Sequence: Synthetic polynucleotide
  source 1..124: mol_type = other RNA
tttggtgactgccacgcccagttttagagctagaaatagcaagttaaaataaggctagtccgttatcaacttgaaaaagtggcaccgagtcggtgcaacatcccttgggcgtggcagtcatttt

SEQ ID NO: 2746 - RNA, 124 nt, synthetic construct
  misc_feature 1..124: note = Description of Artificial Sequence: Synthetic polynucleotide
  source 1..124: mol_type = other RNA
gtttggtgactgccacgcccagttttagagctagaaatagcaagttaaaataaggctagtccgttatcaacttgaaaaagtggcaccgagtcggtgcacaccccttgggcgtggcagttttttt

SEQ ID NO: 2747 - RNA, 124 nt, synthetic construct
  misc_feature 1..124: note = Description of Artificial Sequence: Synthetic polynucleotide
  source 1..124: mol_type = other RNA
tttggtgactgccacgcccagttttagagctagaaatagcaagttaaaataaggctagtccgttatcaacttgaaaaagtggcaccgagtcggtgcaacatccgttgggcgtggcagtcaccaa

SEQ ID NO: 2748 - RNA, 124 nt, synthetic construct
  misc_feature 1..124: note = Description of Artificial Sequence: Synthetic polynucleotide
  source 1..124: mol_type = other RNA
tttggtgactgccacgcccagttttagagctagaaatagcaagttaaaataaggctagtccgttatcaacttgaaaaagtggcaccgagtcggtgcgtgaacaccccttgggcgtggcagtcac

SEQ ID NO: 2749 - RNA, 124 nt, synthetic construct
  misc_feature 1..124: note = Description of Artificial Sequence: Synthetic polynucleotide
  source 1..124: mol_type = other RNA
tttggtgactgccacgcccagttttagagctagaaatagcaagttaaaataaggctagtccgttatcaacttgaaaaagtggcaccgagtcggtgctgaacaccctttgggcgtggcagtcacc

SEQ ID NO: 2750 - RNA, 124 nt, synthetic construct
  misc_feature 1..124: note = Description of Artificial Sequence: Synthetic polynucleotide
  source 1..124: mol_type = other RNA
tttggtgactgccacgcccagttttagagctagaaatagcaagttaaaataaggctagtccgttatcaacttgaaaaagtggcaccgagtcggtgcagtgaacatccgttgggcgtggcatttt

SEQ ID NO: 2751 - RNA, 124 nt, synthetic construct
  misc_feature 1..124: note = Description of Artificial Sequence: Synthetic polynucleotide
  source 1..124: mol_type = other RNA
tttggtgactgccacgcccagttttagagctagaaatagcaagttaaaataaggctagtccgttatcaacttgaaaaagtggcaccgagtcggtgcaacatccgttgggcgtggcagtcatttt

SEQ ID NO: 2752 - RNA, 124 nt, synthetic construct
  misc_feature 1..124: note = Description of Artificial Sequence: Synthetic polynucleotide
  source 1..124: mol_type = other RNA
tttggtgactgccacgcccagttttagagctagaaatagcaagttaaaataaggctagtccgttatcaacttgaaaaagtggcaccgagtcggtgctgaacatcccttgggcgtggcagtcacc

SEQ ID NO: 2753 - RNA, 124 nt, synthetic construct
  misc_feature 1..124: note = Description of Artificial Sequence: Synthetic polynucleotide
  source 1..124: mol_type = other RNA
tttggtgactgccacgcccagttttagagctagaaatagcaagttaaaataaggctagtccgttatcaacttgaaaaagtggcaccgagtcggtgcagtgaacatccgttgggcgtggcagtca

SEQ ID NO: 2754 - RNA, 124 nt, synthetic construct
  misc_feature 1..124: note = Description of Artificial Sequence: Synthetic polynucleotide
  source 1..124: mol_type = other RNA
gtttggtgactgccacgcccagttttagagctagaaatagcaagttaaaataaggctagtccgttatcaacttgaaaaagtggcaccgagtcggtgcgaacacccattgggcgtggcatttttt

SEQ ID NO: 2755 - RNA, 124 nt, synthetic construct
  misc_feature 1..124: note = Description of Artificial Sequence: Synthetic polynucleotide
  source 1..124: mol_type = other RNA
gtttggtgactgccacgcccagttttagagctagaaatagcaagttaaaataaggctagtccgttatcaacttgaaaaagtggcaccgagtcggtgcgaacaccctttgggcgtggcatttttt

SEQ ID NO: 2756 - RNA, 124 nt, synthetic construct
  misc_feature 1..124: note = Description of Artificial Sequence: Synthetic polynucleotide
  source 1..124: mol_type = other RNA
gtttggtgactgccacgcccagttttagagctagaaatagcaagttaaaataaggctagtccgttatcaacttgaaaaagtggcaccgagtcggtgcgaacaccctttgggcgtggcttttttt

SEQ ID NO: 2757 - RNA, 124 nt, synthetic construct
  misc_feature 1..124: note = Description of Artificial Sequence: Synthetic polynucleotide
  source 1..124: mol_type = other RNA
tttggtgactgccacgcccagttttagagctagaaatagcaagttaaaataaggctagtccgttatcaacttgaaaaagtggcaccgagtcggtgcaacacccattgggcgtggcagtcaccaa

SEQ ID NO: 2758 - RNA, 124 nt, synthetic construct
  misc_feature 1..124: note = Description of Artificial Sequence: Synthetic polynucleotide
  source 1..124: mol_type = other RNA
tttggtgactgccacgcccagttttagagctagaaatagcaagttaaaataaggctagtccgttatcaacttgaaaaagtggcaccgagtcggtgcaacaccccttgggcgtggcagtcaccaa

SEQ ID NO: 2759 - RNA, 124 nt, synthetic construct
  misc_feature 1..124: note = Description of Artificial Sequence: Synthetic polynucleotide
  source 1..124: mol_type = other RNA
tttggtgactgccacgcccagttttagagctagaaatagcaagttaaaataaggctagtccgttatcaacttgaaaaagtggcaccgagtcggtgcaacacccgttgggcgtggcagtcaccaa

SEQ ID NO: 2760 - RNA, 124 nt, synthetic construct
  misc_feature 1..124: note = Description of Artificial Sequence: Synthetic polynucleotide
  source 1..124: mol_type = other RNA
tttggtgactgccacgcccagttttagagctagaaatagcaagttaaaataaggctagtccgttatcaacttgaaaaagtggcaccgagtcggtgcaacaccctttgggcgtggcagtcaccaa

SEQ ID NO: 2761 - RNA, 124 nt, synthetic construct
  misc_feature 1..124: note = Description of Artificial Sequence: Synthetic polynucleotide
  source 1..124: mol_type = other RNA
tttggtgactgccacgcccagttttagagctagaaatagcaagttaaaataaggctagtccgttatcaacttgaaaaagtggcaccgagtcggtgcaacatcccttgggcgtggcagtcaccaa

SEQ ID NO: 2762 - RNA, 124 nt, synthetic construct
  misc_feature 1..124: note = Description of Artificial Sequence: Synthetic polynucleotide
  source 1..124: mol_type = other RNA
tttggtgactgccacgcccagttttagagctagaaatagcaagttaaaataaggctagtccgttatcaacttgaaaaagtggcaccgagtcggtgcgcagtgaacatccgttgggcgtggcagt

SEQ ID NO: 2763 - RNA, 124 nt, synthetic construct
  misc_feature 1..124: note = Description of Artificial Sequence: Synthetic polynucleotide
  source 1..124: mol_type = other RNA
gtttggtgactgccacgcccagttttagagctagaaatagcaagttaaaataaggctagtccgttatcaacttgaaaaagtggcaccgagtcggtgcacaccctttgggcgtggcagttttttt

SEQ ID NO: 2764 - RNA, 124 nt, synthetic construct
  misc_feature 1..124: note = Description of Artificial Sequence: Synthetic polynucleotide
  source 1..124: mol_type = other RNA
tttggtgactgccacgcccagttttagagctagaaatagcaagttaaaataaggctagtccgttatcaacttgaaaaagtggcaccgagtcggtgctgaacacccgttgggcgtggcagtcacc

SEQ ID NO: 2765 - RNA, 124 nt, synthetic construct
  misc_feature 1..124: note = Description of Artificial Sequence: Synthetic polynucleotide
  source 1..124: mol_type = other RNA
tttggtgactgccacgcccagttttagagctagaaatagcaagttaaaataaggctagtccgttatcaacttgaaaaagtggcaccgagtcggtgcgcagtgaacacccattgggcgtggcagt

SEQ ID NO: 2766 - RNA, 124 nt, synthetic construct
  misc_feature 1..124: note = Description of Artificial Sequence: Synthetic polynucleotide
  source 1..124: mol_type = other RNA
gtttggtgactgccacgcccagttttagagctagaaatagcaagttaaaataaggctagtccgttatcaacttgaaaaagtggcaccgagtcggtgcgaacaccccttgggcgtggcatttttt

SEQ ID NO: 2767 - RNA, 124 nt, synthetic construct
  misc_feature 1..124: note = Description of Artificial Sequence: Synthetic polynucleotide
  source 1..124: mol_type = other RNA
gtttggtgactgccacgcccagttttagagctagaaatagcaagttaaaataaggctagtccgttatcaacttgaaaaagtggcaccgagtcggtgcgaacacccattgggcgtggcttttttt

SEQ ID NO: 2768 - RNA, 124 nt, synthetic construct
  misc_feature 1..124: note = Description of Artificial Sequence: Synthetic polynucleotide
  source 1..124: mol_type = other RNA
tttggtgactgccacgcccagttttagagctagaaatagcaagttaaaataaggctagtccgttatcaacttgaaaaagtggcaccgagtcggtgctgaacatccgttgggcgtggcagtcacc

SEQ ID NO: 2769 - RNA, 124 nt, synthetic construct
  misc_feature 1..124: note = Description of Artificial Sequence: Synthetic polynucleotide
  source 1..124: mol_type = other RNA
tttggtgactgccacgcccagttttagagctagaaatagcaagttaaaataaggctagtccgttatcaacttgaaaaagtggcaccgagtcggtgcgcagtgaacaccccttgggcgtggcagt

SEQ ID NO: 2770 - RNA, 124 nt, synthetic construct
  misc_feature 1..124: note = Description of Artificial Sequence: Synthetic polynucleotide
  source 1..124: mol_type = other RNA
tttggtgactgccacgcccagttttagagctagaaatagcaagttaaaataaggctagtccgttatcaacttgaaaaagtggcaccgagtcggtgcagtgaacatcccttgggcgtggcagtca

SEQ ID NO: 2771 - RNA, 124 nt, synthetic construct
  misc_feature 1..124: note = Description of Artificial Sequence: Synthetic polynucleotide
  source 1..124: mol_type = other RNA
tttggtgactgccacgcccagttttagagctagaaatagcaagttaaaataaggctagtccgttatcaacttgaaaaagtggcaccgagtcggtgctgaacatccgttgggcgtggcagttttt

SEQ ID NO: 2772 - RNA, 124 nt, synthetic construct
  misc_feature 1..124: note = Description of Artificial Sequence: Synthetic polynucleotide
  source 1..124: mol_type = other RNA
tttggtgactgccacgcccagttttagagctagaaatagcaagttaaaataaggctagtccgttatcaacttgaaaaagtggcaccgagtcggtgcgcagtgaacacccgttgggcgtggcagt

SEQ ID NO: 2773 - RNA, 124 nt, synthetic construct
  misc_feature 1..124: note = Description of Artificial Sequence: Synthetic polynucleotide
  source 1..124: mol_type = other RNA
tttggtgactgccacgcccagttttagagctagaaatagcaagttaaaataaggctagtccgttatcaacttgaaaaagtggcaccgagtcggtgcgcagtgaacaccctttgggcgtggcagt

SEQ ID NO: 2774 - RNA, 124 nt, synthetic construct
  misc_feature 1..124: note = Description of Artificial Sequence: Synthetic polynucleotide
  source 1..124: mol_type = other RNA
tttggtgactgccacgcccagttttagagctagaaatagcaagttaaaataaggctagtccgttatcaacttgaaaaagtggcaccgagtcggtgcgcagtgaacatcccttgggcgtggcagt

SEQ ID NO: 2775 - RNA, 124 nt, synthetic construct
  misc_feature 1..124: note = Description of Artificial Sequence: Synthetic polynucleotide
  source 1..124: mol_type = other RNA
tttggtgactgccacgcccagttttagagctagaaatagcaagttaaaataaggctagtccgttatcaacttgaaaaagtggcaccgagtcggtgctgaacatcccttgggcgtggcagttttt

SEQ ID NO: 2776 - RNA, 125 nt, synthetic construct
  misc_feature 1..125: note = Description of Artificial Sequence: Synthetic polynucleotide
  source 1..125: mol_type = other RNA
tttggtgactgccacgcccagttttagagctagaaatagcaagttaaaataaggctagtccgttatcaacttgaaaaagtggcaccgagtcggtgcgaacatccgttgggcgtggcagtcatttt

SEQ ID NO: 2777 - RNA, 125 nt, synthetic construct
  misc_feature 1..125: note = Description of Artificial Sequence: Synthetic polynucleotide
  source 1..125: mol_type = other RNA
tttggtgactgccacgcccagttttagagctagaaatagcaagttaaaataaggctagtccgttatcaacttgaaaaagtggcaccgagtcggtgcgtgaacacccgttgggcgtggcagtcacc

SEQ ID NO: 2778 - RNA, 125 nt, synthetic construct
  misc_feature 1..125: note = Description of Artificial Sequence: Synthetic polynucleotide
  source 1..125: mol_type = other RNA
gtttggtgactgccacgcccagttttagagctagaaatagcaagttaaaataaggctagtccgttatcaacttgaaaaagtggcaccgagtcggtgctgaacaccccttgggcgtggcatttttt

SEQ ID NO: 2779 - RNA, 125 nt, synthetic construct
  misc_feature 1..125: note = Description of Artificial Sequence: Synthetic polynucleotide
  source 1..125: mol_type = other RNA
gtttggtgactgccacgcccagttttagagctagaaatagcaagttaaaataaggctagtccgttatcaacttgaaaaagtggcaccgagtcggtgctgaacaccccttgggcgtggcttttttt

SEQ ID NO: 2780 - RNA, 125 nt, synthetic construct
  misc_feature 1..125: note = Description of Artificial Sequence: Synthetic polynucleotide
  source 1..125: mol_type = other RNA
gtttggtgactgccacgcccagttttagagctagaaatagcaagttaaaataaggctagtccgttatcaacttgaaaaagtggcaccgagtcggtgcaacaccctttgggcgtggcagttttttt

SEQ ID NO: 2781 - RNA, 125 nt, synthetic construct
  misc_feature 1..125: note = Description of Artificial Sequence: Synthetic polynucleotide
  source 1..125: mol_type = other RNA
gtttggtgactgccacgcccagttttagagctagaaatagcaagttaaaataaggctagtccgttatcaacttgaaaaagtggcaccgagtcggtgctgaacacccattgggcgtggcttttttt

SEQ ID NO: 2782 - RNA, 125 nt, synthetic construct
  misc_feature 1..125: note = Description of Artificial Sequence: Synthetic polynucleotide
  source 1..125: mol_type = other RNA
tttggtgactgccacgcccagttttagagctagaaatagcaagttaaaataaggctagtccgttatcaacttgaaaaagtggcaccgagtcggtgcacatccgttgggcgtggcagtcacctttt

SEQ ID NO: 2783 - RNA, 125 nt, synthetic construct
  misc_feature 1..125: note = Description of Artificial Sequence: Synthetic polynucleotide
  source 1..125: mol_type = other RNA
gtttggtgactgccacgcccagttttagagctagaaatagcaagttaaaataaggctagtccgttatcaacttgaaaaagtggcaccgagtcggtgctgaacaccctttgggcgtggcatttttt

SEQ ID NO: 2784 - RNA, 125 nt, synthetic construct
  misc_feature 1..125: note = Description of Artificial Sequence: Synthetic polynucleotide
  source 1..125: mol_type = other RNA
gtttggtgactgccacgcccagttttagagctagaaatagcaagttaaaataaggctagtccgttatcaacttgaaaaagtggcaccgagtcggtgcgaacaccccttgggcgtggcattttttt

SEQ ID NO: 2785 - RNA, 125 nt, synthetic construct
  misc_feature 1..125: note = Description of Artificial Sequence: Synthetic polynucleotide
  source 1..125: mol_type = other RNA
tttggtgactgccacgcccagttttagagctagaaatagcaagttaaaataaggctagtccgttatcaacttgaaaaagtggcaccgagtcggtgcgaacaccccttgggcgtggcagtcatttt

SEQ ID NO: 2786 - RNA, 125 nt, synthetic construct
  misc_feature 1..125: note = Description of Artificial Sequence: Synthetic polynucleotide
  source 1..125: mol_type = other RNA
tttggtgactgccacgcccagttttagagctagaaatagcaagttaaaataaggctagtccgttatcaacttgaaaaagtggcaccgagtcggtgcgaacatcccttgggcgtggcagtcaccaa

SEQ ID NO: 2787 - RNA, 125 nt, synthetic construct
  misc_feature 1..125: note = Description of Artificial Sequence: Synthetic polynucleotide
  source 1..125: mol_type = other RNA
tttggtgactgccacgcccagttttagagctagaaatagcaagttaaaataaggctagtccgttatcaacttgaaaaagtggcaccgagtcggtgcacatcccttgggcgtggcagtcacctttt

SEQ ID NO: 2788 - RNA, 125 nt, synthetic construct
  misc_feature 1..125: note = Description of Artificial Sequence: Synthetic polynucleotide
  source 1..125: mol_type = other RNA
tttggtgactgccacgcccagttttagagctagaaatagcaagttaaaataaggctagtccgttatcaacttgaaaaagtggcaccgagtcggtgcagtgaacacccattgggcgtggcagtcac

SEQ ID NO: 2789 - RNA, 125 nt, synthetic construct
  misc_feature 1..125: note = Description of Artificial Sequence: Synthetic polynucleotide
  source 1..125: mol_type = other RNA
tttggtgactgccacgcccagttttagagctagaaatagcaagttaaaataaggctagtccgttatcaacttgaaaaagtggcaccgagtcggtgcagtgaacaccctttgggcgtggcagtcac

SEQ ID NO: 2790 - RNA, 125 nt, synthetic construct
  misc_feature 1..125: note = Description of Artificial Sequence: Synthetic polynucleotide
  source 1..125: mol_type = other RNA
tttggtgactgccacgcccagttttagagctagaaatagcaagttaaaataaggctagtccgttatcaacttgaaaaagtggcaccgagtcggtgcgcagtgaacaccctttgggcgtggcagtc

SEQ ID NO: 2791 - RNA, 125 nt, synthetic construct
  misc_feature 1..125: note = Description of Artificial Sequence: Synthetic polynucleotide
  source 1..125: mol_type = other RNA
tttggtgactgccacgcccagttttagagctagaaatagcaagttaaaataaggctagtccgttatcaacttgaaaaagtggcaccgagtcggtgcgcagtgaacacccattgggcgtggcagtc

SEQ ID NO: 2792 - RNA, 125 nt, synthetic construct
  misc_feature 1..125: note = Description of Artificial Sequence: Synthetic polynucleotide
  source 1..125: mol_type = other RNA
tttggtgactgccacgcccagttttagagctagaaatagcaagttaaaataaggctagtccgttatcaacttgaaaaagtggcaccgagtcggtgcgccagcagtgaacaccctttgggcgtggc

SEQ ID NO: 2793 - RNA, 125 nt, synthetic construct
  misc_feature 1..125: note = Description of Artificial Sequence: Synthetic polynucleotide
  source 1..125: mol_type = other RNA
tttggtgactgccacgcccagttttagagctagaaatagcaagttaaaataaggctagtccgttatcaacttgaaaaagtggcaccgagtcggtgcagtgaacacccgttgggcgtggcagtcac

SEQ ID NO: 2794 - RNA, 125 nt, synthetic construct
  misc_feature 1..125: note = Description of Artificial Sequence: Synthetic polynucleotide
  source 1..125: mol_type = other RNA
tttggtgactgccacgcccagttttagagctagaaatagcaagttaaaataaggctagtccgttatcaacttgaaaaagtggcaccgagtcggtgcgccagcagtgaacaccccttgggcgtggc

SEQ ID NO: 2795 - RNA, 125 nt, synthetic construct
  misc_feature 1..125: note = Description of Artificial Sequence: Synthetic polynucleotide
  source 1..125: mol_type = other RNA
tttggtgactgccacgcccagttttagagctagaaatagcaagttaaaataaggctagtccgttatcaacttgaaaaagtggcaccgagtcggtgcgcagtgaacacccgttgggcgtggcagtc

SEQ ID NO: 2796 - RNA, 125 nt, synthetic construct
  misc_feature 1..125: note = Description of Artificial Sequence: Synthetic polynucleotide
  source 1..125: mol_type = other RNA
tttggtgactgccacgcccagttttagagctagaaatagcaagttaaaataaggctagtccgttatcaacttgaaaaagtggcaccgagtcggtgcgcagtgaacaccccttgggcgtggcagtc

SEQ ID NO: 2797 - RNA, 125 nt, synthetic construct
  misc_feature 1..125: note = Description of Artificial Sequence: Synthetic polynucleotide
  source 1..125: mol_type = other RNA
tttggtgactgccacgcccagttttagagctagaaatagcaagttaaaataaggctagtccgttatcaacttgaaaaagtggcaccgagtcggtgcgccagcagtgaacacccattgggcgtggc

SEQ ID NO: 2798 - RNA, 125 nt, synthetic construct
  misc_feature 1..125: note = Description of Artificial Sequence: Synthetic polynucleotide
  source 1..125: mol_type = other RNA
tttggtgactgccacgcccagttttagagctagaaatagcaagttaaaataaggctagtccgttatcaacttgaaaaagtggcaccgagtcggtgcgccagcagtgaacacccgttgggcgtggc

SEQ ID NO: 2799 - RNA, 125 nt, synthetic construct
  misc_feature 1..125: note = Description of Artificial Sequence: Synthetic polynucleotide
  source 1..125: mol_type = other RNA
tttggtgactgccacgcccagttttagagctagaaatagcaagttaaaataaggctagtccgttatcaacttgaaaaagtggcaccgagtcggtgcagtgaacaccccttgggcgtggcagtcac

SEQ ID NO: 2800 - RNA, 125 nt, synthetic construct
  misc_feature 1..125: note = Description of Artificial Sequence: Synthetic polynucleotide
  source 1..125: mol_type = other RNA
tttggtgactgccacgcccagttttagagctagaaatagcaagttaaaataaggctagtccgttatcaacttgaaaaagtggcaccgagtcggtgcgaacacccattgggcgtggcagtcaccaa

SEQ ID NO: 2801 - RNA, 125 nt, synthetic construct
  misc_feature 1..125: note = Description of Artificial Sequence: Synthetic polynucleotide
  source 1..125: mol_type = other RNA
tttggtgactgccacgcccagttttagagctagaaatagcaagttaaaataaggctagtccgttatcaacttgaaaaagtggcaccgagtcggtgcagcagtgaacaccccttgggcgtggcagt

SEQ ID NO: 2802 - RNA, 125 nt, synthetic construct
  misc_feature 1..125: note = Description of Artificial Sequence: Synthetic polynucleotide
  source 1..125: mol_type = other RNA
tttggtgactgccacgcccagttttagagctagaaatagcaagttaaaataaggctagtccgttatcaacttgaaaaagtggcaccgagtcggtgcgtgaacaccccttgggcgtggcagtcacc

SEQ ID NO: 2803 - RNA, 125 nt, synthetic construct
  misc_feature 1..125: note = Description of Artificial Sequence: Synthetic polynucleotide
  source 1..125: mol_type = other RNA
gtttggtgactgccacgcccagttttagagctagaaatagcaagttaaaataaggctagtccgttatcaacttgaaaaagtggcaccgagtcggtgcacacccgttgggcgtggcagtttttttt

SEQ ID NO: 2804 - RNA, 125 nt, synthetic construct
  misc_feature 1..125: note = Description of Artificial Sequence: Synthetic polynucleotide
  source 1..125: mol_type = other RNA
gtttggtgactgccacgcccagttttagagctagaaatagcaagttaaaataaggctagtccgttatcaacttgaaaaagtggcaccgagtcggtgcaacacccattgggcgtggcagttttttt

SEQ ID NO: 2805 - RNA, 125 nt, synthetic construct
  misc_feature 1..125: note = Description of Artificial Sequence: Synthetic polynucleotide
  source 1..125: mol_type = other RNA
gtttggtgactgccacgcccagttttagagctagaaatagcaagttaaaataaggctagtccgttatcaacttgaaaaagtggcaccgagtcggtgcgaacaccctttgggcgtggcattttttt

SEQ ID NO: 2806 - RNA, 125 nt, synthetic construct
  misc_feature 1..125: note = Description of Artificial Sequence: Synthetic polynucleotide
  source 1..125: mol_type = other RNA
gtttggtgactgccacgcccagttttagagctagaaatagcaagttaaaataaggctagtccgttatcaacttgaaaaagtggcaccgagtcggtgctgaacacccgttgggcgtggcttttttt

SEQ ID NO: 2807 - RNA, 125 nt, synthetic construct
  misc_feature 1..125: note = Description of Artificial Sequence: Synthetic polynucleotide
  source 1..125: mol_type = other RNA
tttggtgactgccacgcccagttttagagctagaaatagcaagttaaaataaggctagtccgttatcaacttgaaaaagtggcaccgagtcggtgcagcagtgaacacccattgggcgtggcagt

SEQ ID NO: 2808 - RNA, 125 nt, synthetic construct
  misc_feature 1..125: note = Description of Artificial Sequence: Synthetic polynucleotide
  source 1..125: mol_type = other RNA
gtttggtgactgccacgcccagttttagagctagaaatagcaagttaaaataaggctagtccgttatcaacttgaaaaagtggcaccgagtcggtgcgaacacccgttgggcgtggcattttttt

SEQ ID NO: 2809 - RNA, 125 nt, synthetic construct
  misc_feature 1..125: note = Description of Artificial Sequence: Synthetic polynucleotide
  source 1..125: mol_type = other RNA
gtttggtgactgccacgcccagttttagagctagaaatagcaagttaaaataaggctagtccgttatcaacttgaaaaagtggcaccgagtcggtgctgaacaccctttgggcgtggcttttttt

SEQ ID NO: 2810 - RNA, 125 nt, synthetic construct
  misc_feature 1..125: note = Description of Artificial Sequence: Synthetic polynucleotide
  source 1..125: mol_type = other RNA
tttggtgactgccacgcccagttttagagctagaaatagcaagttaaaataaggctagtccgttatcaacttgaaaaagtggcaccgagtcggtgcagcagtgaacatcccttgggcgtggcagt

SEQ ID NO: 2811 - RNA, 125 nt, synthetic construct
  misc_feature 1..125: note = Description of Artificial Sequence: Synthetic polynucleotide
  source 1..125: mol_type = other RNA
tttggtgactgccacgcccagttttagagctagaaatagcaagttaaaataaggctagtccgttatcaacttgaaaaagtggcaccgagtcggtgcagcagtgaacatccgttgggcgtggcagt

SEQ ID NO: 2812 - RNA, 125 nt, synthetic construct
  misc_feature 1..125: note = Description of Artificial Sequence: Synthetic polynucleotide
  source 1..125: mol_type = other RNA
tttggtgactgccacgcccagttttagagctagaaatagcaagttaaaataaggctagtccgttatcaacttgaaaaagtggcaccgagtcggtgcgaacatccgttgggcgtggcagtcaccaa

SEQ ID NO: 2813 - RNA, 125 nt, synthetic construct
  misc_feature 1..125: note = Description of Artificial Sequence: Synthetic polynucleotide
  source 1..125: mol_type = other RNA
gtttggtgactgccacgcccagttttagagctagaaatagcaagttaaaataaggctagtccgttatcaacttgaaaaagtggcaccgagtcggtgcacaccctttgggcgtggcagtttttttt

SEQ ID NO: 2814 - RNA, 125 nt, synthetic construct
  misc_feature 1..125: note = Description of Artificial Sequence: Synthetic polynucleotide
  source 1..125: mol_type = other RNA
tttggtgactgccacgcccagttttagagctagaaatagcaagttaaaataaggctagtccgttatcaacttgaaaaagtggcaccgagtcggtgcgaacacccgttgggcgtggcagtcaccaa

SEQ ID NO: 2815 - RNA, 125 nt, synthetic construct
  misc_feature 1..125: note = Description of Artificial Sequence: Synthetic polynucleotide
  source 1..125: mol_type = other RNA
gtttggtgactgccacgcccagttttagagctagaaatagcaagttaaaataaggctagtccgttatcaacttgaaaaagtggcaccgagtcggtgcgaacacccattgggcgtggcattttttt

SEQ ID NO: 2816 - RNA, 125 nt, synthetic construct
  misc_feature 1..125: note = Description of Artificial Sequence: Synthetic polynucleotide
  source 1..125: mol_type = other RNA
tttggtgactgccacgcccagttttagagctagaaatagcaagttaaaataaggctagtccgttatcaacttgaaaaagtggcaccgagtcggtgcgtgaacaccctttgggcgtggcagtcacc

SEQ ID NO: 2817 - RNA, 125 nt, synthetic construct
  misc_feature 1..125: note = Description of Artificial Sequence: Synthetic polynucleotide
  source 1..125: mol_type = other RNA
gtttggtgactgccacgcccagttttagagctagaaatagcaagttaaaataaggctagtccgttatcaacttgaaaaagtggcaccgagtcggtgctgaacacccattgggcgtggcatttttt

SEQ ID NO: 2818 - RNA, 125 nt, synthetic construct
  misc_feature 1..125: note = Description of Artificial Sequence: Synthetic polynucleotide
  source 1..125: mol_type = other RNA
tttggtgactgccacgcccagttttagagctagaaatagcaagttaaaataaggctagtccgttatcaacttgaaaaagtggcaccgagtcggtgcgaacatcccttgggcgtggcagtcatttt

SEQ ID NO: 2819 - RNA, 125 nt, synthetic construct
  misc_feature 1..125: note = Description of Artificial Sequence: Synthetic polynucleotide
  source 1..125: mol_type = other RNA
gtttggtgactgccacgcccagttttagagctagaaatagcaagttaaaataaggctagtccgttatcaacttgaaaaagtggcaccgagtcggtgcaacacccgttgggcgtggcagttttttt

SEQ ID NO: 2820 - RNA, 125 nt, synthetic construct
  misc_feature 1..125: note = Description of Artificial Sequence: Synthetic polynucleotide
  source 1..125: mol_type = other RNA
gtttggtgactgccacgcccagttttagagctagaaatagcaagttaaaataaggctagtccgttatcaacttgaaaaagtggcaccgagtcggtgcacacccattgggcgtggcagtttttttt

SEQ ID NO: 2821 - RNA, 125 nt, synthetic construct
  misc_feature 1..125: note = Description of Artificial Sequence: Synthetic polynucleotide
  source 1..125: mol_type = other RNA
gtttggtgactgccacgcccagttttagagctagaaatagcaagttaaaataaggctagtccgttatcaacttgaaaaagtggcaccgagtcggtgcaacaccccttgggcgtggcagttttttt

SEQ ID NO: 2822 - RNA, 125 nt, synthetic construct
  misc_feature 1..125: note = Description of Artificial Sequence: Synthetic polynucleotide
  source 1..125: mol_type = other RNA
gtttggtgactgccacgcccagttttagagctagaaatagcaagttaaaataaggctagtccgttatcaacttgaaaaagtggcaccgagtcggtgctgaacacccgttgggcgtggcatttttt

SEQ ID NO: 2823 - RNA, 125 nt, synthetic construct
  misc_feature 1..125: note = Description of Artificial Sequence: Synthetic polynucleotide
  source 1..125: mol_type = other RNA
tttggtgactgccacgcccagttttagagctagaaatagcaagttaaaataaggctagtccgttatcaacttgaaaaagtggcaccgagtcggtgcgtgaacatccgttgggcgtggcagttttt

SEQ ID NO: 2824 - RNA, 125 nt, synthetic construct
  misc_feature 1..125: note = Description of Artificial Sequence: Synthetic polynucleotide
  source 1..125: mol_type = other RNA
tttggtgactgccacgcccagttttagagctagaaatagcaagttaaaataaggctagtccgttatcaacttgaaaaagtggcaccgagtcggtgcgtgaacatccgttgggcgtggcagtcacc

SEQ ID NO: 2825 - RNA, 125 nt, synthetic construct
  misc_feature 1..125: note = Description of Artificial Sequence: Synthetic polynucleotide
  source 1..125: mol_type = other RNA
tttggtgactgccacgcccagttttagagctagaaatagcaagttaaaataaggctagtccgttatcaacttgaaaaagtggcaccgagtcggtgcgaacaccccttgggcgtggcagtcaccaa

SEQ ID NO: 2826 - RNA, 125 nt, synthetic construct
  misc_feature 1..125: note = Description of Artificial Sequence: Synthetic polynucleotide
  source 1..125: mol_type = other RNA
tttggtgactgccacgcccagttttagagctagaaatagcaagttaaaataaggctagtccgttatcaacttgaaaaagtggcaccgagtcggtgcagcagtgaacacccgttgggcgtggcagt

SEQ ID NO: 2827 - RNA, 125 nt, synthetic construct
  misc_feature 1..125: note = Description of Artificial Sequence: Synthetic polynucleotide
  source 1..125: mol_type = other RNA
gtttggtgactgccacgcccagttttagagctagaaatagcaagttaaaataaggctagtccgttatcaacttgaaaaagtggcaccgagtcggtgcacaccccttgggcgtggcagtttttttt

SEQ ID NO: 2828 - RNA, 125 nt, synthetic construct
  misc_feature 1..125: note = Description of Artificial Sequence: Synthetic polynucleotide
  source 1..125: mol_type = other RNA
tttggtgactgccacgcccagttttagagctagaaatagcaagttaaaataaggctagtccgttatcaacttgaaaaagtggcaccgagtcggtgcgtgaacatcccttgggcgtggcagtcacc

SEQ ID NO: 2829 - RNA, 125 nt, synthetic construct
  misc_feature 1..125: note = Description of Artificial Sequence: Synthetic polynucleotide
  source 1..125: mol_type = other RNA
tttggtgactgccacgcccagttttagagctagaaatagcaagttaaaataaggctagtccgttatcaacttgaaaaagtggcaccgagtcggtgcagcagtgaacaccctttgggcgtggcagt

SEQ ID NO: 2830 - RNA, 125 nt, synthetic construct
  misc_feature 1..125: note = Description of Artificial Sequence: Synthetic polynucleotide
  source 1..125: mol_type = other RNA
tttggtgactgccacgcccagttttagagctagaaatagcaagttaaaataaggctagtccgttatcaacttgaaaaagtggcaccgagtcggtgcgaacaccctttgggcgtggcagtcaccaa

SEQ ID NO: 2831 - RNA, 125 nt, synthetic construct
  misc_feature 1..125: note = Description of Artificial Sequence: Synthetic polynucleotide
  source 1..125: mol_type = other RNA
tttggtgactgccacgcccagttttagagctagaaatagcaagttaaaataaggctagtccgttatcaacttgaaaaagtggcaccgagtcggtgcgtgaacatcccttgggcgtggcagttttt

SEQ ID NO: 2832 - RNA, 125 nt, synthetic construct
  misc_feature 1..125: note = Description of Artificial Sequence: Synthetic polynucleotide
  source 1..125: mol_type = other RNA
tttggtgactgccacgcccagttttagagctagaaatagcaagttaaaataaggctagtccgttatcaacttgaaaaagtggcaccgagtcggtgcgtgaacacccattgggcgtggcagtcacc

SEQ ID NO: 2833 - RNA, 126 nt, synthetic construct
  misc_feature 1..126: note = Description of Artificial Sequence: Synthetic polynucleotide
  source 1..126: mol_type = other RNA
tttggtgactgccacgcccagttttagagctagaaatagcaagttaaaataaggctagtccgttatcaacttgaaaaagtggcaccgagtcggtgcgccagcagtgaacatccgttgggcgtggca

SEQ ID NO: 2834 - RNA, 126 nt, synthetic construct
  misc_feature 1..126: note = Description of Artificial Sequence: Synthetic polynucleotide
  source 1..126: mol_type = other RNA
tttggtgactgccacgcccagttttagagctagaaatagcaagttaaaataaggctagtccgttatcaacttgaaaaagtggcaccgagtcggtgcagtgaacaccctttgggcgtggcagtcacc

SEQ ID NO: 2835 - RNA, 126 nt, synthetic construct
  misc_feature 1..126: note = Description of Artificial Sequence: Synthetic polynucleotide
  source 1..126: mol_type = other RNA
tttggtgactgccacgcccagttttagagctagaaatagcaagttaaaataaggctagtccgttatcaacttgaaaaagtggcaccgagtcggtgcagtgaacatccgttgggcgtggcagttttt

SEQ ID NO: 2836 - RNA, 126 nt, synthetic construct
  misc_feature 1..126: note = Description of Artificial Sequence: Synthetic polynucleotide
  source 1..126: mol_type = other RNA
gtttggtgactgccacgcccagttttagagctagaaatagcaagttaaaataaggctagtccgttatcaacttgaaaaagtggcaccgagtcggtgcgaacaccctttgggcgtggcagttttttt

SEQ ID NO: 2837 - RNA, 126 nt, synthetic construct
  misc_feature 1..126: note = Description of Artificial Sequence: Synthetic polynucleotide
  source 1..126: mol_type = other RNA
gtttggtgactgccacgcccagttttagagctagaaatagcaagttaaaataaggctagtccgttatcaacttgaaaaagtggcaccgagtcggtgcgaacaccccttgggcgtggcagttttttt

SEQ ID NO: 2838 - RNA, 126 nt, synthetic construct
  misc_feature 1..126: note = Description of Artificial Sequence: Synthetic polynucleotide
  source 1..126: mol_type = other RNA
gtttggtgactgccacgcccagttttagagctagaaatagcaagttaaaataaggctagtccgttatcaacttgaaaaagtggcaccgagtcggtgctgaacaccctttgggcgtggcattttttt

SEQ ID NO: 2839 - RNA, 126 nt, synthetic construct
  misc_feature 1..126: note = Description of Artificial Sequence: Synthetic polynucleotide
  source 1..126: mol_type = other RNA
tttggtgactgccacgcccagttttagagctagaaatagcaagttaaaataaggctagtccgttatcaacttgaaaaagtggcaccgagtcggtgcgcagtgaacatccgttgggcgtggcatttt

SEQ ID NO: 2840 - RNA, 126 nt, synthetic construct
  misc_feature 1..126: note = Description of Artificial Sequence: Synthetic polynucleotide
  source 1..126: mol_type = other RNA
gtttggtgactgccacgcccagttttagagctagaaatagcaagttaaaataaggctagtccgttatcaacttgaaaaagtggcaccgagtcggtgcacacccgttgggcgtggcagtcatttttt

SEQ ID NO: 2841 - RNA, 126 nt, synthetic construct
  misc_feature 1..126: note = Description of Artificial Sequence: Synthetic polynucleotide
  source 1..126: mol_type = other RNA
tttggtgactgccacgcccagttttagagctagaaatagcaagttaaaataaggctagtccgttatcaacttgaaaaagtggcaccgagtcggtgctgaacacccattgggcgtggcagtcaccaa

SEQ ID NO: 2842 - RNA, 126 nt, synthetic construct
  misc_feature 1..126: note = Description of Artificial Sequence: Synthetic polynucleotide
  source 1..126: mol_type = other RNA
tttggtgactgccacgcccagttttagagctagaaatagcaagttaaaataaggctagtccgttatcaacttgaaaaagtggcaccgagtcggtgctgaacaccctttgggcgtggcagtcaccaa

SEQ ID NO: 2843 - RNA, 126 nt, synthetic construct
  misc_feature 1..126: note = Description of Artificial Sequence: Synthetic polynucleotide
  source 1..126: mol_type = other RNA
tttggtgactgccacgcccagttttagagctagaaatagcaagttaaaataaggctagtccgttatcaacttgaaaaagtggcaccgagtcggtgctgaacacccgttgggcgtggcagtcaccaa

SEQ ID NO: 2844 - RNA, 126 nt, synthetic construct
  misc_feature 1..126: note = Description of Artificial Sequence: Synthetic polynucleotide
  source 1..126: mol_type = other RNA
tttggtgactgccacgcccagttttagagctagaaatagcaagttaaaataaggctagtccgttatcaacttgaaaaagtggcaccgagtcggtgctgaacaccccttgggcgtggcagtcaccaa

SEQ ID NO: 2845 - RNA, 126 nt, synthetic construct
  misc_feature 1..126: note = Description of Artificial Sequence: Synthetic polynucleotide
  source 1..126: mol_type = other RNA
gtttggtgactgccacgcccagttttagagctagaaatagcaagttaaaataaggctagtccgttatcaacttgaaaaagtggcaccgagtcggtgcgtgaacacccgttgggcgtggcttttttt

SEQ ID NO: 2846 - RNA, 126 nt, synthetic construct
  misc_feature 1..126: note = Description of Artificial Sequence: Synthetic polynucleotide
  source 1..126: mol_type = other RNA
gtttggtgactgccacgcccagttttagagctagaaatagcaagttaaaataaggctagtccgttatcaacttgaaaaagtggcaccgagtcggtgcgtgaacaccccttgggcgtggcagtcacc

SEQ ID NO: 2847 - RNA, 126 nt, synthetic construct
  misc_feature 1..126: note = Description of Artificial Sequence: Synthetic polynucleotide
  source 1..126: mol_type = other RNA
tttggtgactgccacgcccagttttagagctagaaatagcaagttaaaataaggctagtccgttatcaacttgaaaaagtggcaccgagtcggtgctgaacatccgttgggcgtggcagtcaccaa

SEQ ID NO: 2848 - RNA, 126 nt, synthetic construct
  misc_feature 1..126: note = Description of Artificial Sequence: Synthetic polynucleotide
  source 1..126: mol_type = other RNA
gtttggtgactgccacgcccagttttagagctagaaatagcaagttaaaataaggctagtccgttatcaacttgaaaaagtggcaccgagtcggtgcgtgaacacccgttgggcgtggcatttttt

SEQ ID NO: 2849 - RNA, 126 nt, synthetic construct
  misc_feature 1..126: note = Description of Artificial Sequence: Synthetic polynucleotide
  source 1..126: mol_type = other RNA
gtttggtgactgccacgcccagttttagagctagaaatagcaagttaaaataaggctagtccgttatcaacttgaaaaagtggcaccgagtcggtgctgaacaccccttgggcgtggcattttttt

SEQ ID NO: 2850 - RNA, 126 nt, synthetic construct
  misc_feature 1..126: note = Description of Artificial Sequence: Synthetic polynucleotide
  source 1..126: mol_type = other RNA
gtttggtgactgccacgcccagttttagagctagaaatagcaagttaaaataaggctagtccgttatcaacttgaaaaagtggcaccgagtcggtgcgtgaacacccattgggcgtggcttttttt

SEQ ID NO: 2851 - RNA, 126 nt, synthetic construct
  misc_feature 1..126: note = Description of Artificial Sequence: Synthetic polynucleotide
  source 1..126: mol_type = other RNA
gtttggtgactgccacgcccagttttagagctagaaatagcaagttaaaataaggctagtccgttatcaacttgaaaaagtggcaccgagtcggtgcgtgaacaccctttgggcgtggcttttttt

SEQ ID NO: 2852 - RNA, 126 nt, synthetic construct
  misc_feature 1..126: note = Description of Artificial Sequence: Synthetic polynucleotide
  source 1..126: mol_type = other RNA
gtttggtgactgccacgcccagttttagagctagaaatagcaagttaaaataaggctagtccgttatcaacttgaaaaagtggcaccgagtcggtgcgtgaacaccctttgggcgtggcatttttt

SEQ ID NO: 2853 - RNA, 126 nt, synthetic construct
  misc_feature 1..126: note = Description of Artificial Sequence: Synthetic polynucleotide
  source 1..126: mol_type = other RNA
gtttggtgactgccacgcccagttttagagctagaaatagcaagttaaaataaggctagtccgttatcaacttgaaaaagtggcaccgagtcggtgcacaccctttgggcgtggcagtcatttttt

SEQ ID NO: 2854 - RNA, 126 nt, synthetic construct
  misc_feature 1..126: note = Description of Artificial Sequence: Synthetic polynucleotide
  source 1..126: mol_type = other RNA
tttggtgactgccacgcccagttttagagctagaaatagcaagttaaaataaggctagtccgttatcaacttgaaaaagtggcaccgagtcggtgcgccagcagtgaacatcccttgggcgtggca

SEQ ID NO: 2855 - RNA, 126 nt, synthetic construct
  misc_feature 1..126: note = Description of Artificial Sequence: Synthetic polynucleotide
  source 1..126: mol_type = other RNA
tttggtgactgccacgcccagttttagagctagaaatagcaagttaaaataaggctagtccgttatcaacttgaaaaagtggcaccgagtcggtgcgcagtgaacatcccttgggcgtggcagtca

SEQ ID NO: 2856 - RNA, 126 nt, synthetic construct
  misc_feature 1..126: note = Description of Artificial Sequence: Synthetic polynucleotide
  source 1..126: mol_type = other RNA
tttggtgactgccacgcccagttttagagctagaaatagcaagttaaaataaggctagtccgttatcaacttgaaaaagtggcaccgagtcggtgcgccagcagtgaacaccctttgggcgtggca

SEQ ID NO: 2857 - RNA, 126 nt, synthetic construct
  misc_feature 1..126: note = Description of Artificial Sequence: Synthetic polynucleotide
  source 1..126: mol_type = other RNA
tttggtgactgccacgcccagttttagagctagaaatagcaagttaaaataaggctagtccgttatcaacttgaaaaagtggcaccgagtcggtgctgaacatcccttgggcgtggcagtcaccaa

SEQ ID NO: 2858 - RNA, 126 nt, synthetic construct
  misc_feature 1..126: note = Description of Artificial Sequence: Synthetic polynucleotide
  source 1..126: mol_type = other RNA
gtttggtgactgccacgcccagttttagagctagaaatagcaagttaaaataaggctagtccgttatcaacttgaaaaagtggcaccgagtcggtgcacaccctttgggcgtggcagtcttttttt

SEQ ID NO: 2859 - RNA, 126 nt, synthetic construct
  misc_feature 1..126: note = Description of Artificial Sequence: Synthetic polynucleotide
  source 1..126: mol_type = other RNA
gtttggtgactgccacgcccagttttagagctagaaatagcaagttaaaataaggctagtccgttatcaacttgaaaaagtggcaccgagtcggtgcgaacacccattgggcgtggcagttttttt

SEQ ID NO: 2860 - RNA, 126 nt, synthetic construct
  misc_feature 1..126: note = Description of Artificial Sequence: Synthetic polynucleotide
  source 1..126: mol_type = other RNA
gtttggtgactgccacgcccagttttagagctagaaatagcaagttaaaataaggctagtccgttatcaacttgaaaaagtggcaccgagtcggtgctgaacacccattgggcgtggcattttttt

SEQ ID NO: 2861 - RNA, 126 nt, synthetic construct
  misc_feature 1..126: note = Description of Artificial Sequence: Synthetic polynucleotide
  source 1..126: mol_type = other RNA
gtttggtgactgccacgcccagttttagagctagaaatagcaagttaaaataaggctagtccgttatcaacttgaaaaagtggcaccgagtcggtgcacaccccttgggcgtggcagtcttttttt

SEQ ID NO: 2862 - RNA, 126 nt, synthetic construct
  misc_feature 1..126: note = Description of Artificial Sequence: Synthetic polynucleotide
  source 1..126: mol_type = other RNA
tttggtgactgccacgcccagttttagagctagaaatagcaagttaaaataaggctagtccgttatcaacttgaaaaagtggcaccgagtcggtgcggccagcagtgaacacccattgggcgtggc

SEQ ID NO: 2863 - RNA, 126 nt, synthetic construct
  misc_feature 1..126: note = Description of Artificial Sequence: Synthetic polynucleotide
  source 1..126: mol_type = other RNA
gtttggtgactgccacgcccagttttagagctagaaatagcaagttaaaataaggctagtccgttatcaacttgaaaaagtggcaccgagtcggtgcaacacccattgggcgtggcagtttttttt

SEQ ID NO: 2864 - RNA, 126 nt, synthetic construct
  misc_feature 1..126: note = Description of Artificial Sequence: Synthetic polynucleotide
  source 1..126: mol_type = other RNA
tttggtgactgccacgcccagttttagagctagaaatagcaagttaaaataaggctagtccgttatcaacttgaaaaagtggcaccgagtcggtgcagcagtgaacaccctttgggcgtggcagtc

SEQ ID NO: 2865 - RNA, 126 nt, synthetic construct
  misc_feature 1..126: note = Description of Artificial Sequence: Synthetic polynucleotide
  source 1..126: mol_type = other RNA
gtttggtgactgccacgcccagttttagagctagaaatagcaagttaaaataaggctagtccgttatcaacttgaaaaagtggcaccgagtcggtgcaacacccgttgggcgtggcagtttttttt

SEQ ID NO: 2866 - RNA, 126 nt, synthetic construct
  misc_feature 1..126: note = Description of Artificial Sequence: Synthetic polynucleotide
  source 1..126: mol_type = other RNA
tttggtgactgccacgcccagttttagagctagaaatagcaagttaaaataaggctagtccgttatcaacttgaaaaagtggcaccgagtcggtgcagcagtgaacacccgttgggcgtggcagtc

SEQ ID NO: 2867 - RNA, 126 nt, synthetic construct
  misc_feature 1..126: note = Description of Artificial Sequence: Synthetic polynucleotide
  source 1..126: mol_type = other RNA
tttggtgactgccacgcccagttttagagctagaaatagcaagttaaaataaggctagtccgttatcaacttgaaaaagtggcaccgagtcggtgcggccagcagtgaacaccccttgggcgtggc

SEQ ID NO: 2868 - RNA, 126 nt, synthetic construct
  misc_feature 1..126: note = Description of Artificial Sequence: Synthetic polynucleotide
  source 1..126: mol_type = other RNA
tttggtgactgccacgcccagttttagagctagaaatagcaagttaaaataaggctagtccgttatcaacttgaaaaagtggcaccgagtcggtgcggccagcagtgaacaccctttgggcgtggc

SEQ ID NO: 2869 - RNA, 126 nt, synthetic construct
  misc_feature 1..126: note = Description of Artificial Sequence: Synthetic polynucleotide
  source 1..126: mol_type = other RNA
tttggtgactgccacgcccagttttagagctagaaatagcaagttaaaataaggctagtccgttatcaacttgaaaaagtggcaccgagtcggtgcagcagtgaacaccccttgggcgtggcagtc

SEQ ID NO: 2870 - RNA, 126 nt, synthetic construct
  misc_feature 1..126: note = Description of Artificial Sequence: Synthetic polynucleotide
  source 1..126: mol_type = other RNA
tttggtgactgccacgcccagttttagagctagaaatagcaagttaaaataaggctagtccgttatcaacttgaaaaagtggcaccgagtcggtgcggccagcagtgaacacccgttgggcgtggc

SEQ ID NO: 2871 - RNA, 126 nt, synthetic construct
  misc_feature 1..126: note = Description of Artificial Sequence: Synthetic polynucleotide
  source 1..126: mol_type = other RNA
tttggtgactgccacgcccagttttagagctagaaatagcaagttaaaataaggctagtccgttatcaacttgaaaaagtggcaccgagtcggtgcgccagcagtgaacaccccttgggcgtggca

SEQ ID NO: 2872 - RNA, 126 nt, synthetic construct
  misc_feature 1..126: note = Description of Artificial Sequence: Synthetic polynucleotide
  source 1..126: mol_type = other RNA
gtttggtgactgccacgcccagttttagagctagaaatagcaagttaaaataaggctagtccgttatcaacttgaaaaagtggcaccgagtcggtgcgaacacccgttgggcgtggcagttttttt

SEQ ID NO: 2873 - RNA, 126 nt, synthetic construct
  misc_feature 1..126: note = Description of Artificial Sequence: Synthetic polynucleotide
  source 1..126: mol_type = other RNA
tttggtgactgccacgcccagttttagagctagaaatagcaagttaaaataaggctagtccgttatcaacttgaaaaagtggcaccgagtcggtgctgaacatccgttgggcgtggcagtcatttt

SEQ ID NO: 2874 - RNA, 126 nt, synthetic construct
  misc_feature 1..126: note = Description of Artificial Sequence: Synthetic polynucleotide
  source 1..126: mol_type = other RNA
tttggtgactgccacgcccagttttagagctagaaatagcaagttaaaataaggctagtccgttatcaacttgaaaaagtggcaccgagtcggtgcagtgaacatcccttgggcgtggcagttttt

SEQ ID NO: 2875 - RNA, 126 nt, synthetic construct
  misc_feature 1..126: note = Description of Artificial Sequence: Synthetic polynucleotide
  source 1..126: mol_type = other RNA
gtttggtgactgccacgcccagttttagagctagaaatagcaagttaaaataaggctagtccgttatcaacttgaaaaagtggcaccgagtcggtgcgtgaacaccccttgggcgtggcttttttt

SEQ ID NO: 2876 - RNA, 126 nt, synthetic construct
  misc_feature 1..126: note = Description of Artificial Sequence: Synthetic polynucleotide
  source 1..126: mol_type = other RNA
tttggtgactgccacgcccagttttagagctagaaatagcaagttaaaataaggctagtccgttatcaacttgaaaaagtggcaccgagtcggtgctgaacatcccttgggcgtggcagtcatttt

SEQ ID NO: 2877 - RNA, 126 nt, synthetic construct
  misc_feature 1..126: note = Description of Artificial Sequence: Synthetic polynucleotide
  source 1..126: mol_type = other RNA
gtttggtgactgccacgcccagttttagagctagaaatagcaagttaaaataaggctagtccgttatcaacttgaaaaagtggcaccgagtcggtgctgaacacccgttgggcgtggcattttttt

SEQ ID NO: 2878 - RNA, 126 nt, synthetic construct
  misc_feature 1..126: note = Description of Artificial Sequence: Synthetic polynucleotide
  source 1..126: mol_type = other RNA
gtttggtgactgccacgcccagttttagagctagaaatagcaagttaaaataaggctagtccgttatcaacttgaaaaagtggcaccgagtcggtgcaacaccccttgggcgtggcagtttttttt

SEQ ID NO: 2879 - RNA, 126 nt, synthetic construct
  misc_feature 1..126: note = Description of Artificial Sequence: Synthetic polynucleotide
  source 1..126: mol_type = other RNA
gtttggtgactgccacgcccagttttagagctagaaatagcaagttaaaataaggctagtccgttatcaacttgaaaaagtggcaccgagtcggtgcgtgaacaccccttgggcgtggcatttttt

SEQ ID NO: 2880 - RNA, 126 nt, synthetic construct
  misc_feature 1..126: note = Description of Artificial Sequence: Synthetic polynucleotide
  source 1..126: mol_type = other RNA
gtttggtgactgccacgcccagttttagagctagaaatagcaagttaaaataaggctagtccgttatcaacttgaaaaagtggcaccgagtcggtgcacacccgttgggcgtggcagtcttttttt

SEQ ID NO: 2881 - RNA, 126 nt, synthetic construct
  misc_feature 1..126: note = Description of Artificial Sequence: Synthetic polynucleotide
  source 1..126: mol_type = other RNA
gtttggtgactgccacgcccagttttagagctagaaatagcaagttaaaataaggctagtccgttatcaacttgaaaaagtggcaccgagtcggtgcacacccattgggcgtggcagtcatttttt

SEQ ID NO: 2882 - RNA, 126 nt, synthetic construct
  misc_feature 1..126: note = Description of Artificial Sequence: Synthetic polynucleotide
  source 1..126: mol_type = other RNA
gtttggtgactgccacgcccagttttagagctagaaatagcaagttaaaataaggctagtccgttatcaacttgaaaaagtggcaccgagtcggtgcacacccattgggcgtggcagtcttttttt

SEQ ID NO: 2883 - RNA, 126 nt, synthetic construct
  misc_feature 1..126: note = Description of Artificial Sequence: Synthetic polynucleotide
  source 1..126: mol_type = other RNA
gtttggtgactgccacgcccagttttagagctagaaatagcaagttaaaataaggctagtccgttatcaacttgaaaaagtggcaccgagtcggtgcacaccccttgggcgtggcagtcatttttt

SEQ ID NO: 2884 - RNA, 126 nt, synthetic construct
  misc_feature 1..126: note = Description of Artificial Sequence: Synthetic polynucleotide
  source 1..126: mol_type = other RNA
gtttggtgactgccacgcccagttttagagctagaaatagcaagttaaaataaggctagtccgttatcaacttgaaaaagtggcaccgagtcggtgcgtgaacacccattgggcgtggcatttttt

SEQ ID NO: 2885 - RNA, 126 nt, synthetic construct
  misc_feature 1..126: note = Description of Artificial Sequence: Synthetic polynucleotide
  source 1..126: mol_type = other RNA
tttggtgactgccacgcccagttttagagctagaaatagcaagttaaaataaggctagtccgttatcaacttgaaaaagtggcaccgagtcggtgcgcagtgaacacccgttgggcgtggcagtca

SEQ ID NO: 2886 - RNA, 126 nt, synthetic construct
  misc_feature 1..126: note = Description of Artificial Sequence: Synthetic polynucleotide
  source 1..126: mol_type = other RNA
tttggtgactgccacgcccagttttagagctagaaatagcaagttaaaataaggctagtccgttatcaacttgaaaaagtggcaccgagtcggtgcgcagtgaacaccccttgggcgtggcagtca

SEQ ID NO: 2887 - RNA, 126 nt, synthetic construct
  misc_feature 1..126: note = Description of Artificial Sequence: Synthetic polynucleotide
  source 1..126: mol_type = other RNA
tttggtgactgccacgcccagttttagagctagaaatagcaagttaaaataaggctagtccgttatcaacttgaaaaagtggcaccgagtcggtgcagtgaacatcccttgggcgtggcagtcacc

SEQ ID NO: 2888 - RNA, 126 nt, synthetic construct
  misc_feature 1..126: note = Description of Artificial Sequence: Synthetic polynucleotide
  source 1..126: mol_type = other RNA
tttggtgactgccacgcccagttttagagctagaaatagcaagttaaaataaggctagtccgttatcaacttgaaaaagtggcaccgagtcggtgcagtgaacatccgttgggcgtggcagtcacc

SEQ ID NO: 2889 - RNA, 126 nt, synthetic construct
  misc_feature 1..126: note = Description of Artificial Sequence: Synthetic polynucleotide
  source 1..126: mol_type = other RNA
tttggtgactgccacgcccagttttagagctagaaatagcaagttaaaataaggctagtccgttatcaacttgaaaaagtggcaccgagtcggtgcagtgaacacccattgggcgtggcagtcacc

SEQ ID NO: 2890 - RNA, 126 nt, synthetic construct
  misc_feature 1..126: note = Description of Artificial Sequence: Synthetic polynucleotide
  source 1..126: mol_type = other RNA
tttggtgactgccacgcccagttttagagctagaaatagcaagttaaaataaggctagtccgttatcaacttgaaaaagtggcaccgagtcggtgcgcagtgaacacccattgggcgtggcagtca

SEQ ID NO: 2891 - RNA, 126 nt, synthetic construct
  misc_feature 1..126: note = Description of Artificial Sequence: Synthetic polynucleotide
  source 1..126: mol_type = other RNA
tttggtgactgccacgcccagttttagagctagaaatagcaagttaaaataaggctagtccgttatcaacttgaaaaagtggcaccgagtcggtgcgccagcagtgaacacccgttgggcgtggca

SEQ ID NO: 2892 - RNA, 126 nt, synthetic construct
  misc_feature 1..126: note = Description of Artificial Sequence: Synthetic polynucleotide
  source 1..126: mol_type = other RNA
tttggtgactgccacgcccagttttagagctagaaatagcaagttaaaataaggctagtccgttatcaacttgaaaaagtggcaccgagtcggtgcaacatccgttgggcgtggcagtcacctttt

SEQ ID NO: 2893 - RNA, 126 nt, synthetic construct
  misc_feature 1..126: note = Description of Artificial Sequence: Synthetic polynucleotide
  source 1..126: mol_type = other RNA
tttggtgactgccacgcccagttttagagctagaaatagcaagttaaaataaggctagtccgttatcaacttgaaaaagtggcaccgagtcggtgcagtgaacacccgttgggcgtggcagtcacc

SEQ ID NO: 2894 - RNA, 126 nt, synthetic construct
  misc_feature 1..126: note = Description of Artificial Sequence: Synthetic polynucleotide
  source 1..126: mol_type = other RNA
tttggtgactgccacgcccagttttagagctagaaatagcaagttaaaataaggctagtccgttatcaacttgaaaaagtggcaccgagtcggtgcgccagcagtgaacacccattgggcgtggca

SEQ ID NO: 2895 - RNA, 126 nt, synthetic construct
  misc_feature 1..126: note = Description of Artificial Sequence: Synthetic polynucleotide
  source 1..126: mol_type = other RNA
tttggtgactgccacgcccagttttagagctagaaatagcaagttaaaataaggctagtccgttatcaacttgaaaaagtggcaccgagtcggtgcaacatcccttgggcgtggcagtcacctttt

SEQ ID NO: 2896 - RNA, 126 nt, synthetic construct
  misc_feature 1..126: note = Description of Artificial Sequence: Synthetic polynucleotide
  source 1..126: mol_type = other RNA
tttggtgactgccacgcccagttttagagctagaaatagcaagttaaaataaggctagtccgttatcaacttgaaaaagtggcaccgagtcggtgcgcagtgaacatccgttgggcgtggcagtca

SEQ ID NO: 2897 - RNA, 126 nt, synthetic construct
  misc_feature 1..126: note = Description of Artificial Sequence: Synthetic polynucleotide
  source 1..126: mol_type = other RNA
tttggtgactgccacgcccagttttagagctagaaatagcaagttaaaataaggctagtccgttatcaacttgaaaaagtggcaccgagtcggtgcgcagtgaacatcccttgggcgtggcatttt

SEQ ID NO: 2898 - RNA, 126 nt, synthetic construct
  misc_feature 1..126: note = Description of Artificial Sequence: Synthetic polynucleotide
  source 1..126: mol_type = other RNA
tttggtgactgccacgcccagttttagagctagaaatagcaagttaaaataaggctagtccgttatcaacttgaaaaagtggcaccgagtcggtgcagtgaacaccccttgggcgtggcagtcacc

SEQ ID NO: 2899 - RNA, 126 nt, synthetic construct
  misc_feature 1..126: note = Description of Artificial Sequence: Synthetic polynucleotide
  source 1..126: mol_type = other RNA
tttggtgactgccacgcccagttttagagctagaaatagcaagttaaaataaggctagtccgttatcaacttgaaaaagtggcaccgagtcggtgcgcagtgaacaccctttgggcgtggcagtca

SEQ ID NO: 2900 - RNA, 126 nt, synthetic construct
  misc_feature 1..126: note = Description of Artificial Sequence: Synthetic polynucleotide
  source 1..126: mol_type = other RNA
gtttggtgactgccacgcccagttttagagctagaaatagcaagttaaaataaggctagtccgttatcaacttgaaaaagtggcaccgagtcggtgcaacaccctttgggcgtggcagtttttttt

SEQ ID NO: 2901 - RNA, 126 nt, synthetic construct
  misc_feature 1..126: note = Description of Artificial Sequence: Synthetic polynucleotide
  source 1..126: mol_type = other RNA
tttggtgactgccacgcccagttttagagctagaaatagcaagttaaaataaggctagtccgttatcaacttgaaaaagtggcaccgagtcggtgcagcagtgaacacccattgggcgtggcagtc

SEQ ID NO: 2902 - RNA, 127 nt, synthetic construct
  misc_feature 1..127: note = Description of Artificial Sequence: Synthetic polynucleotide
  source 1..127: mol_type = other RNA
tttggtgactgccacgcccagttttagagctagaaatagcaagttaaaataaggctagtccgttatcaacttgaaaaagtggcaccgagtcggtgcgcagtgaacacccattgggcgtggcagtcac

SEQ ID NO: 2903 - RNA, 127 nt, synthetic construct
  misc_feature 1..127: note = Description of Artificial Sequence: Synthetic polynucleotide
  source 1..127: mol_type = other RNA
gtttggtgactgccacgcccagttttagagctagaaatagcaagttaaaataaggctagtccgttatcaacttgaaaaagtggcaccgagtcggtgcaacaccccttgggcgtggcagtcatttttt

SEQ ID NO: 2904 - RNA, 127 nt, synthetic construct
  misc_feature 1..127: note = Description of Artificial Sequence: Synthetic polynucleotide
  source 1..127: mol_type = other RNA
tttggtgactgccacgcccagttttagagctagaaatagcaagttaaaataaggctagtccgttatcaacttgaaaaagtggcaccgagtcggtgcacatccgttgggcgtggcagtcaccaatttt

SEQ ID NO: 2905 - RNA, 127 nt, synthetic construct
  misc_feature 1..127: note = Description of Artificial Sequence: Synthetic polynucleotide
  source 1..127: mol_type = other RNA
gtttggtgactgccacgcccagttttagagctagaaatagcaagttaaaataaggctagtccgttatcaacttgaaaaagtggcaccgagtcggtgcgtgaacacccattgggcgtggcattttttt

SEQ ID NO: 2906 - RNA, 127 nt, synthetic construct
  misc_feature 1..127: note = Description of Artificial Sequence: Synthetic polynucleotide
  source 1..127: mol_type = other RNA
tttggtgactgccacgcccagttttagagctagaaatagcaagttaaaataaggctagtccgttatcaacttgaaaaagtggcaccgagtcggtgcgtgaacatccgttgggcgtggcagtcatttt

SEQ ID NO: 2907 - RNA, 127 nt, synthetic construct
  misc_feature 1..127: note = Description of Artificial Sequence: Synthetic polynucleotide
  source 1..127: mol_type = other RNA
gtttggtgactgccacgcccagttttagagctagaaatagcaagttaaaataaggctagtccgttatcaacttgaaaaagtggcaccgagtcggtgcagtgaacacccattgggcgtggcatttttt

SEQ ID NO: 2908 - RNA, 127 nt, synthetic construct
  misc_feature 1..127: note = Description of Artificial Sequence: Synthetic polynucleotide
  source 1..127: mol_type = other RNA
gtttggtgactgccacgcccagttttagagctagaaatagcaagttaaaataaggctagtccgttatcaacttgaaaaagtggcaccgagtcggtgcaacacccattgggcgtggcagtcatttttt

SEQ ID NO: 2909 - RNA, 127 nt, synthetic construct
  misc_feature 1..127: note = Description of Artificial Sequence: Synthetic polynucleotide
  source 1..127: mol_type = other RNA
tttggtgactgccacgcccagttttagagctagaaatagcaagttaaaataaggctagtccgttatcaacttgaaaaagtggcaccgagtcggtgcgccagcagtgaacacccattgggcgtggcag

SEQ ID NO: 2910 - RNA, 127 nt, synthetic construct
  misc_feature 1..127: note = Description of Artificial Sequence: Synthetic polynucleotide
  source 1..127: mol_type = other RNA
tttggtgactgccacgcccagttttagagctagaaatagcaagttaaaataaggctagtccgttatcaacttgaaaaagtggcaccgagtcggtgcgtgaacatccgttgggcgtggcagtcaccaa

SEQ ID NO: 2911 - RNA, 127 nt, synthetic construct
  misc_feature 1..127: note = Description of Artificial Sequence: Synthetic polynucleotide
  source 1..127: mol_type = other RNA
gtttggtgactgccacgcccagttttagagctagaaatagcaagttaaaataaggctagtccgttatcaacttgaaaaagtggcaccgagtcggtgcgtgaacaccccttgggcgtggcattttttt

SEQ ID NO: 2912 - RNA, 127 nt, synthetic construct
  misc_feature 1..127: note = Description of Artificial Sequence: Synthetic polynucleotide
  source 1..127: mol_type = other RNA
tttggtgactgccacgcccagttttagagctagaaatagcaagttaaaataaggctagtccgttatcaacttgaaaaagtggcaccgagtcggtgcgaacatccgttgggcgtggcagtcacctttt

SEQ ID NO: 2913 - RNA, 127 nt, synthetic construct
  misc_feature 1..127: note = Description of Artificial Sequence: Synthetic polynucleotide
  source 1..127: mol_type = other RNA
gtttggtgactgccacgcccagttttagagctagaaatagcaagttaaaataaggctagtccgttatcaacttgaaaaagtggcaccgagtcggtgcagtgaacaccccttgggcgtggcatttttt

SEQ ID NO: 2914 - RNA, 127 nt, synthetic construct
  misc_feature 1..127: note = Description of Artificial Sequence: Synthetic polynucleotide
  source 1..127: mol_type = other RNA
tttggtgactgccacgcccagttttagagctagaaatagcaagttaaaataaggctagtccgttatcaacttgaaaaagtggcaccgagtcggtgcaggccagcagtgaacaccctttgggcgtggc

SEQ ID NO: 2915 - RNA, 127 nt, synthetic construct
  misc_feature 1..127: note = Description of Artificial Sequence: Synthetic polynucleotide
  source 1..127: mol_type = other RNA
tttggtgactgccacgcccagttttagagctagaaatagcaagttaaaataaggctagtccgttatcaacttgaaaaagtggcaccgagtcggtgcgaacatcccttgggcgtggcagtcacctttt

SEQ ID NO: 2916 - RNA, 127 nt, synthetic construct
  misc_feature 1..127: note = Description of Artificial Sequence: Synthetic polynucleotide
  source 1..127: mol_type = other RNA
tttggtgactgccacgcccagttttagagctagaaatagcaagttaaaataaggctagtccgttatcaacttgaaaaagtggcaccgagtcggtgcagcagtgaacaccccttgggcgtggcagtca

SEQ ID NO: 2917 - RNA, 127 nt, synthetic construct
  misc_feature 1..127: note = Description of Artificial Sequence: Synthetic polynucleotide
  source 1..127: mol_type = other RNA
tttggtgactgccacgcccagttttagagctagaaatagcaagttaaaataaggctagtccgttatcaacttgaaaaagtggcaccgagtcggtgcacatcccttgggcgtggcagtcaccaatttt

SEQ ID NO: 2918 - RNA, 127 nt, synthetic construct
  misc_feature 1..127: note = Description of Artificial Sequence: Synthetic polynucleotide
  source 1..127: mol_type = other RNA
tttggtgactgccacgcccagttttagagctagaaatagcaagttaaaataaggctagtccgttatcaacttgaaaaagtggcaccgagtcggtgcgccagcagtgaacacccgttgggcgtggcag

SEQ ID NO: 2919 - RNA, 127 nt, synthetic construct
  misc_feature 1..127: note = Description of Artificial Sequence: Synthetic polynucleotide
  source 1..127: mol_type = other RNA
tttggtgactgccacgcccagttttagagctagaaatagcaagttaaaataaggctagtccgttatcaacttgaaaaagtggcaccgagtcggtgcggccagcagtgaacacccattgggcgtggca

SEQ ID NO: 2920 - RNA, 127 nt, synthetic construct
  misc_feature 1..127: note = Description of Artificial Sequence: Synthetic polynucleotide
  source 1..127: mol_type = other RNA
tttggtgactgccacgcccagttttagagctagaaatagcaagttaaaataaggctagtccgttatcaacttgaaaaagtggcaccgagtcggtgcgcagtgaacaccctttgggcgtggcagtcac

SEQ ID NO: 2921 - RNA, 127 nt, synthetic construct
  misc_feature 1..127: note = Description of Artificial Sequence: Synthetic polynucleotide
  source 1..127: mol_type = other RNA
gtttggtgactgccacgcccagttttagagctagaaatagcaagttaaaataaggctagtccgttatcaacttgaaaaagtggcaccgagtcggtgctgaacacccattgggcgtggcagttttttt

SEQ ID NO: 2922 - RNA, 127 nt, synthetic construct
  misc_feature 1..127: note = Description of Artificial Sequence: Synthetic polynucleotide
  source 1..127: mol_type = other RNA
gtttggtgactgccacgcccagttttagagctagaaatagcaagttaaaataaggctagtccgttatcaacttgaaaaagtggcaccgagtcggtgcgtgaacacccgttgggcgtggcattttttt

SEQ ID NO: 2923 - RNA, 127 nt, synthetic construct
  misc_feature 1..127: note = Description of Artificial Sequence: Synthetic polynucleotide
  source 1..127: mol_type = other RNA
tttggtgactgccacgcccagttttagagctagaaatagcaagttaaaataaggctagtccgttatcaacttgaaaaagtggcaccgagtcggtgcagcagtgaacatcccttgggcgtggcatttt

SEQ ID NO: 2924 - RNA, 127 nt, synthetic construct
  misc_feature 1..127: note = Description of Artificial Sequence: Synthetic polynucleotide
  source 1..127: mol_type = other RNA
gtttggtgactgccacgcccagttttagagctagaaatagcaagttaaaataaggctagtccgttatcaacttgaaaaagtggcaccgagtcggtgcagtgaacacccgttgggcgtggcttttttt

SEQ ID NO: 2925 - RNA, 127 nt, synthetic construct
  misc_feature 1..127: note = Description of Artificial Sequence: Synthetic polynucleotide
  source 1..127: mol_type = other RNA
gtttggtgactgccacgcccagttttagagctagaaatagcaagttaaaataaggctagtccgttatcaacttgaaaaagtggcaccgagtcggtgcagtgaacaccctttgggcgtggcttttttt

SEQ ID NO: 2926 - RNA, 127 nt, synthetic construct
  misc_feature 1..127: note = Description of Artificial Sequence: Synthetic polynucleotide
  source 1..127: mol_type = other RNA
tttggtgactgccacgcccagttttagagctagaaatagcaagttaaaataaggctagtccgttatcaacttgaaaaagtggcaccgagtcggtgcgtgaacaccctttgggcgtggcagtcaccaa

SEQ ID NO: 2927 - RNA, 127 nt, synthetic construct
  misc_feature 1..127: note = Description of Artificial Sequence: Synthetic polynucleotide
  source 1..127: mol_type = other RNA
tttggtgactgccacgcccagttttagagctagaaatagcaagttaaaataaggctagtccgttatcaacttgaaaaagtggcaccgagtcggtgcggccagcagtgaacaccccttgggcgtggca

SEQ ID NO: 2928 - RNA, 127 nt, synthetic construct
  misc_feature 1..127: note = Description of Artificial Sequence: Synthetic polynucleotide
  source 1..127: mol_type = other RNA
gtttggtgactgccacgcccagttttagagctagaaatagcaagttaaaataaggctagtccgttatcaacttgaaaaagtggcaccgagtcggtgcgtgaacaccctttgggcgtggcattttttt

SEQ ID NO: 2929 - RNA, 127 nt, synthetic construct
  misc_feature 1..127: note = Description of Artificial Sequence: Synthetic polynucleotide
  source 1..127: mol_type = other RNA
gtttggtgactgccacgcccagttttagagctagaaatagcaagttaaaataaggctagtccgttatcaacttgaaaaagtggcaccgagtcggtgcagtgaacaccctttgggcgtggcatttttt

SEQ ID NO: 2930 - RNA, 127 nt, synthetic construct
  misc_feature 1..127: note = Description of Artificial Sequence: Synthetic polynucleotide
  source 1..127: mol_type = other RNA
gtttggtgactgccacgcccagttttagagctagaaatagcaagttaaaataaggctagtccgttatcaacttgaaaaagtggcaccgagtcggtgcagtgaacaccccttgggcgtggcttttttt

SEQ ID NO: 2931 - RNA, 127 nt, synthetic construct
  misc_feature 1..127: note = Description of Artificial Sequence: Synthetic polynucleotide
  source 1..127: mol_type = other RNA
gtttggtgactgccacgcccagttttagagctagaaatagcaagttaaaataaggctagtccgttatcaacttgaaaaagtggcaccgagtcggtgctgaacacccgttgggcgtggcagttttttt

SEQ ID NO: 2932 - RNA, 127 nt, synthetic construct
  misc_feature 1..127: note = Description of Artificial Sequence: Synthetic polynucleotide
  source 1..127: mol_type = other RNA
tttggtgactgccacgcccagttttagagctagaaatagcaagttaaaataaggctagtccgttatcaacttgaaaaagtggcaccgagtcggtgcgtgaacaccccttgggcgtggcagtcaccaa

SEQ ID NO: 2933 - RNA, 127 nt, synthetic construct
  misc_feature 1..127: note = Description of Artificial Sequence: Synthetic polynucleotide
  source 1..127: mol_type = other RNA
tttggtgactgccacgcccagttttagagctagaaatagcaagttaaaataaggctagtccgttatcaacttgaaaaagtggcaccgagtcggtgcgtgaacacccattgggcgtggcagtcaccaa

SEQ ID NO: 2934 - RNA, 127 nt, synthetic construct
  misc_feature 1..127: note = Description of Artificial Sequence: Synthetic polynucleotide
  source 1..127: mol_type = other RNA
gtttggtgactgccacgcccagttttagagctagaaatagcaagttaaaataaggctagtccgttatcaacttgaaaaagtggcaccgagtcggtgcaacacccattgggcgtggcagtcttttttt

SEQ ID NO: 2935 - RNA, 127 nt, synthetic construct
  misc_feature 1..127: note = Description of Artificial Sequence: Synthetic polynucleotide
  source 1..127: mol_type = other RNA
gtttggtgactgccacgcccagttttagagctagaaatagcaagttaaaataaggctagtccgttatcaacttgaaaaagtggcaccgagtcggtgcacacccattgggcgtggcagtcattttttt

SEQ ID NO: 2936 - RNA, 127 nt, synthetic construct
  misc_feature 1..127: note = Description of Artificial Sequence: Synthetic polynucleotide
  source 1..127: mol_type = other RNA
gtttggtgactgccacgcccagttttagagctagaaatagcaagttaaaataaggctagtccgttatcaacttgaaaaagtggcaccgagtcggtgctgaacaccccttgggcgtggcagttttttt

SEQ ID NO: 2937 - RNA, 127 nt, synthetic construct
  misc_feature 1..127: note = Description of Artificial Sequence: Synthetic polynucleotide
  source 1..127: mol_type = other RNA
tttggtgactgccacgcccagttttagagctagaaatagcaagttaaaataaggctagtccgttatcaacttgaaaaagtggcaccgagtcggtgcaggccagcagtgaacacccgttgggcgtggc

SEQ ID NO: 2938 - RNA, 127 nt, synthetic construct
  misc_feature 1..127: note = Description of Artificial Sequence: Synthetic polynucleotide
  source 1..127: mol_type = other RNA
tttggtgactgccacgcccagttttagagctagaaatagcaagttaaaataaggctagtccgttatcaacttgaaaaagtggcaccgagtcggtgcggccagcagtgaacaccctttgggcgtggca

SEQ ID NO: 2939 - RNA, 127 nt, synthetic construct
  misc_feature 1..127: note = Description of Artificial Sequence: Synthetic polynucleotide
  source 1..127: mol_type = other RNA
tttggtgactgccacgcccagttttagagctagaaatagcaagttaaaataaggctagtccgttatcaacttgaaaaagtggcaccgagtcggtgcagcagtgaacatccgttgggcgtggcagtca

SEQ ID NO: 2940 - RNA, 127 nt, synthetic construct
  misc_feature 1..127: note = Description of Artificial Sequence: Synthetic polynucleotide
  source 1..127: mol_type = other RNA
gtttggtgactgccacgcccagttttagagctagaaatagcaagttaaaataaggctagtccgttatcaacttgaaaaagtggcaccgagtcggtgcagtgaacacccattgggcgtggcttttttt

SEQ ID NO: 2941 - RNA, 127 nt, synthetic construct
  misc_feature 1..127: note = Description of Artificial Sequence: Synthetic polynucleotide
  source 1..127: mol_type = other RNA
tttggtgactgccacgcccagttttagagctagaaatagcaagttaaaataaggctagtccgttatcaacttgaaaaagtggcaccgagtcggtgcagcagtgaacaccctttgggcgtggcagtca

SEQ ID NO: 2942 - RNA, 127 nt, synthetic construct
  misc_feature 1..127: note = Description of Artificial Sequence: Synthetic polynucleotide
  source 1..127: mol_type = other RNA
tttggtgactgccacgcccagttttagagctagaaatagcaagttaaaataaggctagtccgttatcaacttgaaaaagtggcaccgagtcggtgcggccagcagtgaacacccgttgggcgtggca

SEQ ID NO: 2943 - RNA, 127 nt, synthetic construct
  misc_feature 1..127: note = Description of Artificial Sequence: Synthetic polynucleotide
  source 1..127: mol_type = other RNA
gtttggtgactgccacgcccagttttagagctagaaatagcaagttaaaataaggctagtccgttatcaacttgaaaaagtggcaccgagtcggtgcaacacccgttgggcgtggcagtcatttttt

SEQ ID NO: 2944 - RNA, 127 nt, synthetic construct
  misc_feature 1..127: note = Description of Artificial Sequence: Synthetic polynucleotide
  source 1..127: mol_type = other RNA
gtttggtgactgccacgcccagttttagagctagaaatagcaagttaaaataaggctagtccgttatcaacttgaaaaagtggcaccgagtcggtgcaacacccgttgggcgtggcagtcttttttt

SEQ ID NO: 2945 - RNA, 127 nt, synthetic construct
  misc_feature 1..127: note = Description of Artificial Sequence: Synthetic polynucleotide
  source 1..127: mol_type = other RNA
tttggtgactgccacgcccagttttagagctagaaatagcaagttaaaataaggctagtccgttatcaacttgaaaaagtggcaccgagtcggtgcagcagtgaacatcccttgggcgtggcagtca

SEQ ID NO: 2946 - RNA, 127 nt, synthetic construct
  misc_feature 1..127: note = Description of Artificial Sequence: Synthetic polynucleotide
  source 1..127: mol_type = other RNA
gtttggtgactgccacgcccagttttagagctagaaatagcaagttaaaataaggctagtccgttatcaacttgaaaaagtggcaccgagtcggtgcacaccctttgggcgtggcagtcattttttt

SEQ ID NO: 2947 - RNA, 127 nt, synthetic construct
  misc_feature 1..127: note = Description of Artificial Sequence: Synthetic polynucleotide
  source 1..127: mol_type = other RNA
gtttggtgactgccacgcccagttttagagctagaaatagcaagttaaaataaggctagtccgttatcaacttgaaaaagtggcaccgagtcggtgcaacaccctttgggcgtggcagtcatttttt

SEQ ID NO: 2948 - RNA, 127 nt, synthetic construct
  misc_feature 1..127: note = Description of Artificial Sequence: Synthetic polynucleotide
  source 1..127: mol_type = other RNA
tttggtgactgccacgcccagttttagagctagaaatagcaagttaaaataaggctagtccgttatcaacttgaaaaagtggcaccgagtcggtgcagcagtgaacatccgttgggcgtggcatttt

SEQ ID NO: 2949 - RNA, 127 nt, synthetic construct
  misc_feature 1..127: note = Description of Artificial Sequence: Synthetic polynucleotide
  source 1..127: mol_type = other RNA
gtttggtgactgccacgcccagttttagagctagaaatagcaagttaaaataaggctagtccgttatcaacttgaaaaagtggcaccgagtcggtgcacacccgttgggcgtggcagtcattttttt

SEQ ID NO: 2950 - RNA, 127 nt, synthetic construct
  misc_feature 1..127: note = Description of Artificial Sequence: Synthetic polynucleotide
  source 1..127: mol_type = other RNA
gtttggtgactgccacgcccagttttagagctagaaatagcaagttaaaataaggctagtccgttatcaacttgaaaaagtggcaccgagtcggtgcaacaccccttgggcgtggcagtcttttttt

SEQ ID NO: 2951 - RNA, 127 nt, synthetic construct
  misc_feature 1..127: note = Description of Artificial Sequence: Synthetic polynucleotide
  source 1..127: mol_type = other RNA
gtttggtgactgccacgcccagttttagagctagaaatagcaagttaaaataaggctagtccgttatcaacttgaaaaagtggcaccgagtcggtgctgaacaccctttgggcgtggcagttttttt

SEQ ID NO: 2952 - RNA, 127 nt, synthetic construct
  misc_feature 1..127: note = Description of Artificial Sequence: Synthetic polynucleotide
  source 1..127: mol_type = other RNA
tttggtgactgccacgcccagttttagagctagaaatagcaagttaaaataaggctagtccgttatcaacttgaaaaagtggcaccgagtcggtgcgtgaacatcccttgggcgtggcagtcatttt

SEQ ID NO: 2953 - RNA, 127 nt, synthetic construct
  misc_feature 1..127: note = Description of Artificial Sequence: Synthetic polynucleotide
  source 1..127: mol_type = other RNA
tttggtgactgccacgcccagttttagagctagaaatagcaagttaaaataaggctagtccgttatcaacttgaaaaagtggcaccgagtcggtgcaggccagcagtgaacacccattgggcgtggc

SEQ ID NO: 2954 - RNA, 127 nt, synthetic construct
  misc_feature 1..127: note = Description of Artificial Sequence: Synthetic polynucleotide
  source 1..127: mol_type = other RNA
tttggtgactgccacgcccagttttagagctagaaatagcaagttaaaataaggctagtccgttatcaacttgaaaaagtggcaccgagtcggtgcaggccagcagtgaacaccccttgggcgtggc

SEQ ID NO: 2955 - RNA, 127 nt, synthetic construct
  misc_feature 1..127: note = Description of Artificial Sequence: Synthetic polynucleotide
  source 1..127: mol_type = other RNA
gtttggtgactgccacgcccagttttagagctagaaatagcaagttaaaataaggctagtccgttatcaacttgaaaaagtggcaccgagtcggtgcgaacaccccttgggcgtggcagtttttttt

SEQ ID NO: 2956 - RNA, 127 nt, synthetic construct
  misc_feature 1..127: note = Description of Artificial Sequence: Synthetic polynucleotide
  source 1..127: mol_type = other RNA
tttggtgactgccacgcccagttttagagctagaaatagcaagttaaaataaggctagtccgttatcaacttgaaaaagtggcaccgagtcggtgcgccagcagtgaacaccccttgggcgtggcag

SEQ ID NO: 2957 - RNA, 127 nt, synthetic construct
  misc_feature 1..127: note = Description of Artificial Sequence: Synthetic polynucleotide
  source 1..127: mol_type = other RNA
tttggtgactgccacgcccagttttagagctagaaatagcaagttaaaataaggctagtccgttatcaacttgaaaaagtggcaccgagtcggtgcgcagtgaacaccccttgggcgtggcagtcac

SEQ ID NO: 2958 - RNA, 127 nt, synthetic construct
  misc_feature 1..127: note = Description of Artificial Sequence: Synthetic polynucleotide
  source 1..127: mol_type = other RNA
gtttggtgactgccacgcccagttttagagctagaaatagcaagttaaaataaggctagtccgttatcaacttgaaaaagtggcaccgagtcggtgcgaacaccctttgggcgtggcagtttttttt

SEQ ID NO: 2959 - RNA, 127 nt, synthetic construct
  misc_feature 1..127: note = Description of Artificial Sequence: Synthetic polynucleotide
  source 1..127: mol_type = other RNA
gtttggtgactgccacgcccagttttagagctagaaatagcaagttaaaataaggctagtccgttatcaacttgaaaaagtggcaccgagtcggtgcaacaccctttgggcgtggcagtcttttttt

SEQ ID NO: 2960 - RNA, 127 nt, synthetic construct
  misc_feature 1..127: note = Description of Artificial Sequence: Synthetic polynucleotide
  source 1..127: mol_type = other RNA
tttggtgactgccacgcccagttttagagctagaaatagcaagttaaaataaggctagtccgttatcaacttgaaaaagtggcaccgagtcggtgcagcagtgaacacccgttgggcgtggcagtca

SEQ ID NO: 2961 - RNA, 127 nt, synthetic construct
  misc_feature 1..127: note = Description of Artificial Sequence: Synthetic polynucleotide
  source 1..127: mol_type = other RNA
gtttggtgactgccacgcccagttttagagctagaaatagcaagttaaaataaggctagtccgttatcaacttgaaaaagtggcaccgagtcggtgcacaccccttgggcgtggcagtcattttttt

SEQ ID NO: 2962 - RNA, 127 nt, synthetic construct
  misc_feature 1..127: note = Description of Artificial Sequence: Synthetic polynucleotide
  source 1..127: mol_type = other RNA
tttggtgactgccacgcccagttttagagctagaaatagcaagttaaaataaggctagtccgttatcaacttgaaaaagtggcaccgagtcggtgcagcagtgaacacccattgggcgtggcagtca

SEQ ID NO: 2963 - RNA, 127 nt, synthetic construct
  misc_feature 1..127: note = Description of Artificial Sequence: Synthetic polynucleotide
  source 1..127: mol_type = other RNA
tttggtgactgccacgcccagttttagagctagaaatagcaagttaaaataaggctagtccgttatcaacttgaaaaagtggcaccgagtcggtgcgcagtgaacacccgttgggcgtggcagtcac

SEQ ID NO: 2964 - RNA, 127 nt, synthetic construct
  misc_feature 1..127: note = Description of Artificial Sequence: Synthetic polynucleotide
  source 1..127: mol_type = other RNA
tttggtgactgccacgcccagttttagagctagaaatagcaagttaaaataaggctagtccgttatcaacttgaaaaagtggcaccgagtcggtgcgtgaacacccgttgggcgtggcagtcaccaa

SEQ ID NO: 2965 - RNA, 127 nt, synthetic construct
  misc_feature 1..127: note = Description of Artificial Sequence: Synthetic polynucleotide
  source 1..127: mol_type = other RNA
tttggtgactgccacgcccagttttagagctagaaatagcaagttaaaataaggctagtccgttatcaacttgaaaaagtggcaccgagtcggtgcgccagcagtgaacaccctttgggcgtggcag

SEQ ID NO: 2966 - RNA, 127 nt, synthetic construct
  misc_feature 1..127: note = Description of Artificial Sequence: Synthetic polynucleotide
  source 1..127: mol_type = other RNA
gtttggtgactgccacgcccagttttagagctagaaatagcaagttaaaataaggctagtccgttatcaacttgaaaaagtggcaccgagtcggtgcgaacacccgttgggcgtggcagtttttttt

SEQ ID NO: 2967 - RNA, 127 nt, synthetic construct
  misc_feature 1..127: note = Description of Artificial Sequence: Synthetic polynucleotide
  source 1..127: mol_type = other RNA
tttggtgactgccacgcccagttttagagctagaaatagcaagttaaaataaggctagtccgttatcaacttgaaaaagtggcaccgagtcggtgcgtgaacatcccttgggcgtggcagtcaccaa

SEQ ID NO: 2968 - RNA, 127 nt, synthetic construct
  misc_feature 1..127: note = Description of Artificial Sequence: Synthetic polynucleotide
  source 1..127: mol_type = other RNA
gtttggtgactgccacgcccagttttagagctagaaatagcaagttaaaataaggctagtccgttatcaacttgaaaaagtggcaccgagtcggtgcagtgaacacccgttgggcgtggcatttttt

SEQ ID NO: 2969 - RNA, 127 nt, synthetic construct
  misc_feature 1..127: note = Description of Artificial Sequence: Synthetic polynucleotide
  source 1..127: mol_type = other RNA
gtttggtgactgccacgcccagttttagagctagaaatagcaagttaaaataaggctagtccgttatcaacttgaaaaagtggcaccgagtcggtgcgaacacccattgggcgtggcagtttttttt

SEQ ID NO: 2970 - RNA, 128 nt, synthetic construct
  misc_feature 1..128: note = Description of Artificial Sequence: Synthetic polynucleotide
  source 1..128: mol_type = other RNA
tttggtgactgccacgcccagttttagagctagaaatagcaagttaaaataaggctagtccgttatcaacttgaaaaagtggcaccgagtcggtgctgaacatccgttgggcgtggcagtcacctttt

SEQ ID NO: 2971 - RNA, 128 nt, synthetic construct
  misc_feature 1..128: note = Description of Artificial Sequence: Synthetic polynucleotide
  source 1..128: mol_type = other RNA
gtttggtgactgccacgcccagttttagagctagaaatagcaagttaaaataaggctagtccgttatcaacttgaaaaagtggcaccgagtcggtgcacacccattgggcgtggcagtcacctttttt

SEQ ID NO: 2972 - RNA, 128 nt, synthetic construct
  misc_feature 1..128: note = Description of Artificial Sequence: Synthetic polynucleotide
  source 1..128: mol_type = other RNA
tttggtgactgccacgcccagttttagagctagaaatagcaagttaaaataaggctagtccgttatcaacttgaaaaagtggcaccgagtcggtgcagtgaacaccctttgggcgtggcagtcaccaa

SEQ ID NO: 2973 - RNA, 128 nt, synthetic construct
  misc_feature 1..128: note = Description of Artificial Sequence: Synthetic polynucleotide
  source 1..128: mol_type = other RNA
tttggtgactgccacgcccagttttagagctagaaatagcaagttaaaataaggctagtccgttatcaacttgaaaaagtggcaccgagtcggtgcagtgaacatccgttgggcgtggcagtcaccaa

SEQ ID NO: 2974 - RNA, 128 nt, synthetic construct
  misc_feature 1..128: note = Description of Artificial Sequence: Synthetic polynucleotide
  source 1..128: mol_type = other RNA
tttggtgactgccacgcccagttttagagctagaaatagcaagttaaaataaggctagtccgttatcaacttgaaaaagtggcaccgagtcggtgcgcagtgaacatccgttgggcgtggcagttttt

SEQ ID NO: 2975 - RNA, 128 nt, synthetic construct
  misc_feature 1..128: note = Description of Artificial Sequence: Synthetic polynucleotide
  source 1..128: mol_type = other RNA
gtttggtgactgccacgcccagttttagagctagaaatagcaagttaaaataaggctagtccgttatcaacttgaaaaagtggcaccgagtcggtgcgaacacccattgggcgtggcagtcatttttt

SEQ ID NO: 2976 - RNA, 128 nt, synthetic construct
  misc_feature 1..128: note = Description of Artificial Sequence: Synthetic polynucleotide
  source 1..128: mol_type = other RNA
gtttggtgactgccacgcccagttttagagctagaaatagcaagttaaaataaggctagtccgttatcaacttgaaaaagtggcaccgagtcggtgctgaacaccctttgggcgtggcagtttttttt

SEQ ID NO: 2977 - RNA, 128 nt, synthetic construct
  misc_feature 1..128: note = Description of Artificial Sequence: Synthetic polynucleotide
  source 1..128: mol_type = other RNA
tttggtgactgccacgcccagttttagagctagaaatagcaagttaaaataaggctagtccgttatcaacttgaaaaagtggcaccgagtcggtgcgccagcagtgaacacccattgggcgtggcagt

SEQ ID NO: 2978 - RNA, 128 nt, synthetic construct
  misc_feature 1..128: note = Description of Artificial Sequence: Synthetic polynucleotide
  source 1..128: mol_type = other RNA
gtttggtgactgccacgcccagttttagagctagaaatagcaagttaaaataaggctagtccgttatcaacttgaaaaagtggcaccgagtcggtgctgaacaccccttgggcgtggcagtttttttt

SEQ ID NO: 2979 - RNA, 128 nt, synthetic construct
  misc_feature 1..128: note = Description of Artificial Sequence: Synthetic polynucleotide
  source 1..128: mol_type = other RNA
tttggtgactgccacgcccagttttagagctagaaatagcaagttaaaataaggctagtccgttatcaacttgaaaaagtggcaccgagtcggtgcagtgaacacccattgggcgtggcagtcaccaa

SEQ ID NO: 2980 - RNA, 128 nt, synthetic construct
  misc_feature 1..128: note = Description of Artificial Sequence: Synthetic polynucleotide
  source 1..128: mol_type = other RNA
tttggtgactgccacgcccagttttagagctagaaatagcaagttaaaataaggctagtccgttatcaacttgaaaaagtggcaccgagtcggtgcgccagcagtgaacatcccttgggcgtggcagt

SEQ ID NO: 2981 - RNA, 128 nt, synthetic construct
  misc_feature 1..128: note = Description of Artificial Sequence: Synthetic polynucleotide
  source 1..128: mol_type = other RNA
gtttggtgactgccacgcccagttttagagctagaaatagcaagttaaaataaggctagtccgttatcaacttgaaaaagtggcaccgagtcggtgctgaacacccattgggcgtggcagtttttttt

SEQ ID NO: 2982 - RNA, 128 nt, synthetic construct
  misc_feature 1..128: note = Description of Artificial Sequence: Synthetic polynucleotide
  source 1..128: mol_type = other RNA
tttggtgactgccacgcccagttttagagctagaaatagcaagttaaaataaggctagtccgttatcaacttgaaaaagtggcaccgagtcggtgcgcagtgaacacccattgggcgtggcagtcacc

SEQ ID NO: 2983 - RNA, 128 nt, synthetic construct
  misc_feature 1..128: note = Description of Artificial Sequence: Synthetic polynucleotide
  source 1..128: mol_type = other RNA
tttggtgactgccacgcccagttttagagctagaaatagcaagttaaaataaggctagtccgttatcaacttgaaaaagtggcaccgagtcggtgcgccagcagtgaacaccccttgggcgtggcagt

SEQ ID NO: 2984 - RNA, 128 nt, synthetic construct
  misc_feature 1..128: note = Description of Artificial Sequence: Synthetic polynucleotide
  source 1..128: mol_type = other RNA
gtttggtgactgccacgcccagttttagagctagaaatagcaagttaaaataaggctagtccgttatcaacttgaaaaagtggcaccgagtcggtgcagtgaacacccattgggcgtggcattttttt

SEQ ID NO: 2985 - RNA, 128 nt, synthetic construct
  misc_feature 1..128: note = Description of Artificial Sequence: Synthetic polynucleotide
  source 1..128: mol_type = other RNA
gtttggtgactgccacgcccagttttagagctagaaatagcaagttaaaataaggctagtccgttatcaacttgaaaaagtggcaccgagtcggtgcgaacaccctttgggcgtggcagtcttttttt

SEQ ID NO: 2986 - RNA, 128 nt, synthetic construct
  misc_feature 1..128: note = Description of Artificial Sequence: Synthetic polynucleotide
  source 1..128: mol_type = other RNA
gtttggtgactgccacgcccagttttagagctagaaatagcaagttaaaataaggctagtccgttatcaacttgaaaaagtggcaccgagtcggtgcaacacccgttgggcgtggcagtcattttttt

SEQ ID NO: 2987 - RNA, 128 nt, synthetic construct
  misc_feature 1..128: note = Description of Artificial Sequence: Synthetic polynucleotide
  source 1..128: mol_type = other RNA
tttggtgactgccacgcccagttttagagctagaaatagcaagttaaaataaggctagtccgttatcaacttgaaaaagtggcaccgagtcggtgcagtgaacatcccttgggcgtggcagtcatttt

SEQ ID NO: 2988 - RNA, 128 nt, synthetic construct
  misc_feature 1..128: note = Description of Artificial Sequence: Synthetic polynucleotide
  source 1..128: mol_type = other RNA
tttggtgactgccacgcccagttttagagctagaaatagcaagttaaaataaggctagtccgttatcaacttgaaaaagtggcaccgagtcggtgcagtgaacacccgttgggcgtggcagtcaccaa

SEQ ID NO: 2989 - RNA, 128 nt, synthetic construct
  misc_feature 1..128: note = Description of Artificial Sequence: Synthetic polynucleotide
  source 1..128: mol_type = other RNA
tttggtgactgccacgcccagttttagagctagaaatagcaagttaaaataaggctagtccgttatcaacttgaaaaagtggcaccgagtcggtgcaacatcccttgggcgtggcagtcaccaatttt

SEQ ID NO: 2990 - RNA, 128 nt, synthetic construct
  misc_feature 1..128: note = Description of Artificial Sequence: Synthetic polynucleotide
  source 1..128: mol_type = other RNA
gtttggtgactgccacgcccagttttagagctagaaatagcaagttaaaataaggctagtccgttatcaacttgaaaaagtggcaccgagtcggtgcaacaccccttgggcgtggcagtcattttttt

SEQ ID NO: 2991 - RNA, 128 nt, synthetic construct
  misc_feature 1..128: note = Description of Artificial Sequence: Synthetic polynucleotide
  source 1..128: mol_type = other RNA
tttggtgactgccacgcccagttttagagctagaaatagcaagttaaaataaggctagtccgttatcaacttgaaaaagtggcaccgagtcggtgcagtgaacatcccttgggcgtggcagtcaccaa

SEQ ID NO: 2992 - RNA, 128 nt, synthetic construct
  misc_feature 1..128: note = Description of Artificial Sequence: Synthetic polynucleotide
  source 1..128: mol_type = other RNA
gtttggtgactgccacgcccagttttagagctagaaatagcaagttaaaataaggctagtccgttatcaacttgaaaaagtggcaccgagtcggtgcaacacccattgggcgtggcagtcattttttt

SEQ ID NO: 2993 - RNA, 128 nt, synthetic construct
  misc_feature 1..128: note = Description of Artificial Sequence: Synthetic polynucleotide
  source 1..128: mol_type = other RNA
tttggtgactgccacgcccagttttagagctagaaatagcaagttaaaataaggctagtccgttatcaacttgaaaaagtggcaccgagtcggtgcagtgaacaccccttgggcgtggcagtcaccaa

SEQ ID NO: 2994 - RNA, 128 nt, synthetic construct
  misc_feature 1..128: note = Description of Artificial Sequence: Synthetic polynucleotide
  source 1..128: mol_type = other RNA
tttggtgactgccacgcccagttttagagctagaaatagcaagttaaaataaggctagtccgttatcaacttgaaaaagtggcaccgagtcggtgcagcagtgaacaccccttgggcgtggcagtcac

SEQ ID NO: 2995 - RNA, 128 nt, synthetic construct
  misc_feature 1..128: note = Description of Artificial Sequence: Synthetic polynucleotide
  source 1..128: mol_type = other RNA
tttggtgactgccacgcccagttttagagctagaaatagcaagttaaaataaggctagtccgttatcaacttgaaaaagtggcaccgagtcggtgcagcagtgaacacccattgggcgtggcagtcac

SEQ ID NO: 2996 - RNA, 128 nt, synthetic construct
  misc_feature 1..128: note = Description of Artificial Sequence: Synthetic polynucleotide
  source 1..128: mol_type = other RNA
gtttggtgactgccacgcccagttttagagctagaaatagcaagttaaaataaggctagtccgttatcaacttgaaaaagtggcaccgagtcggtgcacaccccttgggcgtggcagtcacttttttt

SEQ ID NO: 2997 - RNA, 128 nt, synthetic construct
  misc_feature 1..128: note = Description of Artificial Sequence: Synthetic polynucleotide
  source 1..128: mol_type = other RNA
tttggtgactgccacgcccagttttagagctagaaatagcaagttaaaataaggctagtccgttatcaacttgaaaaagtggcaccgagtcggtgcaggccagcagtgaacacccattgggcgtggca

SEQ ID NO: 2998 - RNA, 128 nt, synthetic construct
  misc_feature 1..128: note = Description of Artificial Sequence: Synthetic polynucleotide
  source 1..128: mol_type = other RNA
gtttggtgactgccacgcccagttttagagctagaaatagcaagttaaaataaggctagtccgttatcaacttgaaaaagtggcaccgagtcggtgcacaccccttgggcgtggcagtcacctttttt

SEQ ID NO: 2999 - RNA, 128 nt, synthetic construct
  misc_feature 1..128: note = Description of Artificial Sequence: Synthetic polynucleotide
  source 1..128: mol_type = other RNA
gtttggtgactgccacgcccagttttagagctagaaatagcaagttaaaataaggctagtccgttatcaacttgaaaaagtggcaccgagtcggtgcgaacaccccttgggcgtggcagtcttttttt

SEQ ID NO: 3000 - RNA, 128 nt, synthetic construct
  misc_feature 1..128: note = Description of Artificial Sequence: Synthetic polynucleotide
  source 1..128: mol_type = other RNA
gtttggtgactgccacgcccagttttagagctagaaatagcaagttaaaataaggctagtccgttatcaacttgaaaaagtggcaccgagtcggtgcacacccattgggcgtggcagtcacttttttt

SEQ ID NO: 3001 - RNA, 128 nt, synthetic construct
  misc_feature 1..128: note = Description of Artificial Sequence: Synthetic polynucleotide
  source 1..128: mol_type = other RNA
gtttggtgactgccacgcccagttttagagctagaaatagcaagttaaaataaggctagtccgttatcaacttgaaaaagtggcaccgagtcggtgcgtgaacaccctttgggcgtggcagttttttt

SEQ ID NO: 3002 - RNA, 128 nt, synthetic construct
  misc_feature 1..128: note = Description of Artificial Sequence: Synthetic polynucleotide
  source 1..128: mol_type = other RNA
gtttggtgactgccacgcccagttttagagctagaaatagcaagttaaaataaggctagtccgttatcaacttgaaaaagtggcaccgagtcggtgcagtgaacacccgttgggcgtggcattttttt

SEQ ID NO: 3003 - RNA, 128 nt, synthetic construct
  misc_feature 1..128: note = Description of Artificial Sequence: Synthetic polynucleotide
  source 1..128: mol_type = other RNA
tttggtgactgccacgcccagttttagagctagaaatagcaagttaaaataaggctagtccgttatcaacttgaaaaagtggcaccgagtcggtgcgcagtgaacatcccttgggcgtggcagttttt

SEQ ID NO: 3004 - RNA, 128 nt, synthetic construct
  misc_feature 1..128: note = Description of Artificial Sequence: Synthetic polynucleotide
  source 1..128: mol_type = other RNA
gtttggtgactgccacgcccagttttagagctagaaatagcaagttaaaataaggctagtccgttatcaacttgaaaaagtggcaccgagtcggtgcgtgaacacccattgggcgtggcagttttttt

SEQ ID NO: 3005 - RNA, 128 nt, synthetic construct
  misc_feature 1..128: note = Description of Artificial Sequence: Synthetic polynucleotide
  source 1..128: mol_type = other RNA
gtttggtgactgccacgcccagttttagagctagaaatagcaagttaaaataaggctagtccgttatcaacttgaaaaagtggcaccgagtcggtgcgaacaccccttgggcgtggcagtcatttttt

SEQ ID NO: 3006 - RNA, 128 nt, synthetic construct
  misc_feature 1..128: note = Description of Artificial Sequence: Synthetic polynucleotide
  source 1..128: mol_type = other RNA
tttggtgactgccacgcccagttttagagctagaaatagcaagttaaaataaggctagtccgttatcaacttgaaaaagtggcaccgagtcggtgcgccagcagtgaacatccgttgggcgtggcagt

SEQ ID NO: 3007 - RNA, 128 nt, synthetic construct
  misc_feature 1..128: note = Description of Artificial Sequence: Synthetic polynucleotide
  source 1..128: mol_type = other RNA
gtttggtgactgccacgcccagttttagagctagaaatagcaagttaaaataaggctagtccgttatcaacttgaaaaagtggcaccgagtcggtgcacaccctttgggcgtggcagtcacttttttt

SEQ ID NO: 3008 - RNA, 128 nt, synthetic construct
  misc_feature 1..128: note = Description of Artificial Sequence: Synthetic polynucleotide
  source 1..128: mol_type = other RNA
tttggtgactgccacgcccagttttagagctagaaatagcaagttaaaataaggctagtccgttatcaacttgaaaaagtggcaccgagtcggtgcgcagtgaacatcccttgggcgtggcagtcacc

SEQ ID NO: 3009 - RNA, 128 nt, synthetic construct
  misc_feature 1..128: note = Description of Artificial Sequence: Synthetic polynucleotide
  source 1..128: mol_type = other RNA
gtttggtgactgccacgcccagttttagagctagaaatagcaagttaaaataaggctagtccgttatcaacttgaaaaagtggcaccgagtcggtgcacacccgttgggcgtggcagtcacctttttt

SEQ ID NO: 3010 - RNA, 128 nt, synthetic construct
  misc_feature 1..128: note = Description of Artificial Sequence: Synthetic polynucleotide
  source 1..128: mol_type = other RNA
gtttggtgactgccacgcccagttttagagctagaaatagcaagttaaaataaggctagtccgttatcaacttgaaaaagtggcaccgagtcggtgcaacaccctttgggcgtggcagtcattttttt

SEQ ID NO: 3011 - RNA, 128 nt, synthetic construct
  misc_feature 1..128: note = Description of Artificial Sequence: Synthetic polynucleotide
  source 1..128: mol_type = other RNA
gtttggtgactgccacgcccagttttagagctagaaatagcaagttaaaataaggctagtccgttatcaacttgaaaaagtggcaccgagtcggtgcacacccgttgggcgtggcagtcacttttttt

SEQ ID NO: 3012 - RNA, 128 nt, synthetic construct
  misc_feature 1..128: note = Description of Artificial Sequence: Synthetic polynucleotide
  source 1..128: mol_type = other RNA
tttggtgactgccacgcccagttttagagctagaaatagcaagttaaaataaggctagtccgttatcaacttgaaaaagtggcaccgagtcggtgcgccagcagtgaacacccgttgggcgtggcagt

SEQ ID NO: 3013 - RNA, 128 nt, synthetic construct
  misc_feature 1..128: note = Description of Artificial Sequence: Synthetic polynucleotide
  source 1..128: mol_type = other RNA
tttggtgactgccacgcccagttttagagctagaaatagcaagttaaaataaggctagtccgttatcaacttgaaaaagtggcaccgagtcggtgcgcagtgaacaccctttgggcgtggcagtcacc

SEQ ID NO: 3014 - RNA, 128 nt, synthetic construct
  misc_feature 1..128: note = Description of Artificial Sequence: Synthetic polynucleotide
  source 1..128: mol_type = other RNA
gtttggtgactgccacgcccagttttagagctagaaatagcaagttaaaataaggctagtccgttatcaacttgaaaaagtggcaccgagtcggtgcagtgaacaccccttgggcgtggcattttttt

SEQ ID NO: 3015 - RNA, 128 nt, synthetic construct
  misc_feature 1..128: note = Description of Artificial Sequence: Synthetic polynucleotide
  source 1..128: mol_type = other RNA
tttggtgactgccacgcccagttttagagctagaaatagcaagttaaaataaggctagtccgttatcaacttgaaaaagtggcaccgagtcggtgcgcagtgaacacccgttgggcgtggcagtcacc

SEQ ID NO: 3016 - RNA, 128 nt, synthetic construct
  misc_feature 1..128: note = Description of Artificial Sequence: Synthetic polynucleotide
  source 1..128: mol_type = other RNA
gtttggtgactgccacgcccagttttagagctagaaatagcaagttaaaataaggctagtccgttatcaacttgaaaaagtggcaccgagtcggtgcgaacacccgttgggcgtggcagtcttttttt

SEQ ID NO: 3017 - RNA, 128 nt, synthetic construct
  misc_feature 1..128: note = Description of Artificial Sequence: Synthetic polynucleotide
  source 1..128: mol_type = other RNA
gtttggtgactgccacgcccagttttagagctagaaatagcaagttaaaataaggctagtccgttatcaacttgaaaaagtggcaccgagtcggtgcgaacaccctttgggcgtggcagtcatttttt

SEQ ID NO: 3018 - RNA, 128 nt, synthetic construct
  misc_feature 1..128: note = Description of Artificial Sequence: Synthetic polynucleotide
  source 1..128: mol_type = other RNA
gtttggtgactgccacgcccagttttagagctagaaatagcaagttaaaataaggctagtccgttatcaacttgaaaaagtggcaccgagtcggtgcgaacacccgttgggcgtggcagtcatttttt

SEQ ID NO: 3019 - RNA, 128 nt, synthetic construct
  misc_feature 1..128: note = Description of Artificial Sequence: Synthetic polynucleotide
  source 1..128: mol_type = other RNA
gtttggtgactgccacgcccagttttagagctagaaatagcaagttaaaataaggctagtccgttatcaacttgaaaaagtggcaccgagtcggtgcgtgaacacccgttgggcgtggcagttttttt

SEQ ID NO: 3020 - RNA, 128 nt, synthetic construct
  misc_feature 1..128: note = Description of Artificial Sequence: Synthetic polynucleotide
  source 1..128: mol_type = other RNA
gtttggtgactgccacgcccagttttagagctagaaatagcaagttaaaataaggctagtccgttatcaacttgaaaaagtggcaccgagtcggtgcacaccctttgggcgtggcagtcacctttttt

SEQ ID NO: 3021 - RNA, 128 nt, synthetic construct
  misc_feature 1..128: note = Description of Artificial Sequence: Synthetic polynucleotide
  source 1..128: mol_type = other RNA
gtttggtgactgccacgcccagttttagagctagaaatagcaagttaaaataaggctagtccgttatcaacttgaaaaagtggcaccgagtcggtgcgtgaacaccccttgggcgtggcagttttttt

SEQ ID NO: 3022 - RNA, 128 nt, synthetic construct
  misc_feature 1..128: note = Description of Artificial Sequence: Synthetic polynucleotide
  source 1..128: mol_type = other RNA
tttggtgactgccacgcccagttttagagctagaaatagcaagttaaaataaggctagtccgttatcaacttgaaaaagtggcaccgagtcggtgcaacatccgttgggcgtggcagtcaccaatttt

SEQ ID NO: 3023 - RNA, 128 nt, synthetic construct
  misc_feature 1..128: note = Description of Artificial Sequence: Synthetic polynucleotide
  source 1..128: mol_type = other RNA
tttggtgactgccacgcccagttttagagctagaaatagcaagttaaaataaggctagtccgttatcaacttgaaaaagtggcaccgagtcggtgcgccagcagtgaacaccctttgggcgtggcagt

SEQ ID NO: 3024 - RNA, 128 nt, synthetic construct
  misc_feature 1..128: note = Description of Artificial Sequence: Synthetic polynucleotide
  source 1..128: mol_type = other RNA
tttggtgactgccacgcccagttttagagctagaaatagcaagttaaaataaggctagtccgttatcaacttgaaaaagtggcaccgagtcggtgcgcagtgaacatccgttgggcgtggcagtcacc

SEQ ID NO: 3025 - RNA, 128 nt, synthetic construct
  misc_feature 1..128: note = Description of Artificial Sequence: Synthetic polynucleotide
  source 1..128: mol_type = other RNA
tttggtgactgccacgcccagttttagagctagaaatagcaagttaaaataaggctagtccgttatcaacttgaaaaagtggcaccgagtcggtgctgaacatcccttgggcgtggcagtcacctttt

SEQ ID NO: 3026 - RNA, 128 nt, synthetic construct
  misc_feature 1..128: note = Description of Artificial Sequence: Synthetic polynucleotide
  source 1..128: mol_type = other RNA
gtttggtgactgccacgcccagttttagagctagaaatagcaagttaaaataaggctagtccgttatcaacttgaaaaagtggcaccgagtcggtgcgaacacccattgggcgtggcagtcttttttt

SEQ ID NO: 3027 - RNA, 128 nt, synthetic construct
  misc_feature 1..128: note = Description of Artificial Sequence: Synthetic polynucleotide
  source 1..128: mol_type = other RNA
tttggtgactgccacgcccagttttagagctagaaatagcaagttaaaataaggctagtccgttatcaacttgaaaaagtggcaccgagtcggtgcgaggccagcagtgaacacccattgggcgtggc

SEQ ID NO: 3028 - RNA, 128 nt, synthetic construct
  misc_feature 1..128: note = Description of Artificial Sequence: Synthetic polynucleotide
  source 1..128: mol_type = other RNA
tttggtgactgccacgcccagttttagagctagaaatagcaagttaaaataaggctagtccgttatcaacttgaaaaagtggcaccgagtcggtgcaggccagcagtgaacaccccttgggcgtggca

SEQ ID NO: 3029 - RNA, 128 nt, synthetic construct
  misc_feature 1..128: note = Description of Artificial Sequence: Synthetic polynucleotide
  source 1..128: mol_type = other RNA
tttggtgactgccacgcccagttttagagctagaaatagcaagttaaaataaggctagtccgttatcaacttgaaaaagtggcaccgagtcggtgcaggccagcagtgaacacccgttgggcgtggca

SEQ ID NO: 3030 - RNA, 128 nt, synthetic construct
  misc_feature 1..128: note = Description of Artificial Sequence: Synthetic polynucleotide
  source 1..128: mol_type = other RNA
tttggtgactgccacgcccagttttagagctagaaatagcaagttaaaataaggctagtccgttatcaacttgaaaaagtggcaccgagtcggtgcgaggccagcagtgaacaccccttgggcgtggc

SEQ ID NO: 3031 - RNA, 128 nt, synthetic construct
  misc_feature 1..128: note = Description of Artificial Sequence: Synthetic polynucleotide
  source 1..128: mol_type = other RNA
tttggtgactgccacgcccagttttagagctagaaatagcaagttaaaataaggctagtccgttatcaacttgaaaaagtggcaccgagtcggtgcggccagcagtgaacaccctttgggcgtggcag

SEQ ID NO: 3032 - RNA, 128 nt, synthetic construct
  misc_feature 1..128: note = Description of Artificial Sequence: Synthetic polynucleotide
  source 1..128: mol_type = other RNA
tttggtgactgccacgcccagttttagagctagaaatagcaagttaaaataaggctagtccgttatcaacttgaaaaagtggcaccgagtcggtgcaggccagcagtgaacaccctttgggcgtggca

SEQ ID NO: 3033 - RNA, 128 nt, synthetic construct
  misc_feature 1..128: note = Description of Artificial Sequence: Synthetic polynucleotide
  source 1..128: mol_type = other RNA
tttggtgactgccacgcccagttttagagctagaaatagcaagttaaaataaggctagtccgttatcaacttgaaaaagtggcaccgagtcggtgcgaggccagcagtgaacaccctttgggcgtggc

SEQ ID NO: 3034 - RNA, 128 nt, synthetic construct
  misc_feature 1..128: note = Description of Artificial Sequence: Synthetic polynucleotide
  source 1..128: mol_type = other RNA
tttggtgactgccacgcccagttttagagctagaaatagcaagttaaaataaggctagtccgttatcaacttgaaaaagtggcaccgagtcggtgcggccagcagtgaacaccccttgggcgtggcag

SEQ ID NO: 3035 - RNA, 128 nt, synthetic construct
  misc_feature 1..128: note = Description of Artificial Sequence: Synthetic polynucleotide
  source 1..128: mol_type = other RNA
tttggtgactgccacgcccagttttagagctagaaatagcaagttaaaataaggctagtccgttatcaacttgaaaaagtggcaccgagtcggtgcagcagtgaacaccctttgggcgtggcagtcac

SEQ ID NO: 3036 - RNA, 128 nt, synthetic construct
  misc_feature 1..128: note = Description of Artificial Sequence: Synthetic polynucleotide
  source 1..128: mol_type = other RNA
tttggtgactgccacgcccagttttagagctagaaatagcaagttaaaataaggctagtccgttatcaacttgaaaaagtggcaccgagtcggtgcgaggccagcagtgaacacccgttgggcgtggc

SEQ ID NO: 3037 - RNA, 128 nt, synthetic construct
  misc_feature 1..128: note = Description of Artificial Sequence: Synthetic polynucleotide
  source 1..128: mol_type = other RNA
tttggtgactgccacgcccagttttagagctagaaatagcaagttaaaataaggctagtccgttatcaacttgaaaaagtggcaccgagtcggtgcggccagcagtgaacacccgttgggcgtggcag

SEQ ID NO: 3038 - RNA, 128 nt, synthetic construct
  misc_feature 1..128: note = Description of Artificial Sequence: Synthetic polynucleotide
  source 1..128: mol_type = other RNA
tttggtgactgccacgcccagttttagagctagaaatagcaagttaaaataaggctagtccgttatcaacttgaaaaagtggcaccgagtcggtgcagcagtgaacacccgttgggcgtggcagtcac

SEQ ID NO: 3039 - RNA, 128 nt, synthetic construct
  misc_feature 1..128: note = Description of Artificial Sequence: Synthetic polynucleotide
  source 1..128: mol_type = other RNA
tttggtgactgccacgcccagttttagagctagaaatagcaagttaaaataaggctagtccgttatcaacttgaaaaagtggcaccgagtcggtgcggccagcagtgaacacccattgggcgtggcag

SEQ ID NO: 3040 - RNA, 128 nt, synthetic construct
  misc_feature 1..128: note = Description of Artificial Sequence: Synthetic polynucleotide
  source 1..128: mol_type = other RNA
tttggtgactgccacgcccagttttagagctagaaatagcaagttaaaataaggctagtccgttatcaacttgaaaaagtggcaccgagtcggtgcagtgaacatccgttgggcgtggcagtcatttt

SEQ ID NO: 3041 - RNA, 128 nt, synthetic construct
  misc_feature 1..128: note = Description of Artificial Sequence: Synthetic polynucleotide
  source 1..128: mol_type = other RNA
gtttggtgactgccacgcccagttttagagctagaaatagcaagttaaaataaggctagtccgttatcaacttgaaaaagtggcaccgagtcggtgcagtgaacaccctttgggcgtggcattttttt

SEQ ID NO: 3042 - RNA, 128 nt, synthetic construct
  misc_feature 1..128: note = Description of Artificial Sequence: Synthetic polynucleotide
  source 1..128: mol_type = other RNA
gtttggtgactgccacgcccagttttagagctagaaatagcaagttaaaataaggctagtccgttatcaacttgaaaaagtggcaccgagtcggtgctgaacacccgttgggcgtggcagtttttttt

SEQ ID NO: 3043 - RNA, 128 nt, synthetic construct
  misc_feature 1..128: note = Description of Artificial Sequence: Synthetic polynucleotide
  source 1..128: mol_type = other RNA
tttggtgactgccacgcccagttttagagctagaaatagcaagttaaaataaggctagtccgttatcaacttgaaaaagtggcaccgagtcggtgcgcagtgaacaccccttgggcgtggcagtcacc

SEQ ID NO: 3044 - RNA, 129 nt, synthetic construct
  misc_feature 1..129: note = Description of Artificial Sequence: Synthetic polynucleotide
  source 1..129: mol_type = other RNA
tttggtgactgccacgcccagttttagagctagaaatagcaagttaaaataaggctagtccgttatcaacttgaaaaagtggcaccgagtcggtgcggaggccagcagtgaacacccattgggcgtggc

SEQ ID NO: 3045 - RNA, 129 nt, synthetic construct
  misc_feature 1..129: note = Description of Artificial Sequence: Synthetic polynucleotide
  source 1..129: mol_type = other RNA
tttggtgactgccacgcccagttttagagctagaaatagcaagttaaaataaggctagtccgttatcaacttgaaaaagtggcaccgagtcggtgcggccagcagtgaacacccgttgggcgtggcagt

SEQ ID NO: 3046 - RNA, 129 nt, synthetic construct
  misc_feature 1..129: note = Description of Artificial Sequence: Synthetic polynucleotide
  source 1..129: mol_type = other RNA
tttggtgactgccacgcccagttttagagctagaaatagcaagttaaaataaggctagtccgttatcaacttgaaaaagtggcaccgagtcggtgcaggccagcagtgaacacccgttgggcgtggcag

SEQ ID NO: 3047 - RNA, 129 nt, synthetic construct
  misc_feature 1..129: note = Description of Artificial Sequence: Synthetic polynucleotide
  source 1..129: mol_type = other RNA
gtttggtgactgccacgcccagttttagagctagaaatagcaagttaaaataaggctagtccgttatcaacttgaaaaagtggcaccgagtcggtgcgcagtgaacaccctttgggcgtggcatttttt

SEQ ID NO: 3048 - RNA, 129 nt, synthetic construct
  misc_feature 1..129: note = Description of Artificial Sequence: Synthetic polynucleotide
  source 1..129: mol_type = other RNA
tttggtgactgccacgcccagttttagagctagaaatagcaagttaaaataaggctagtccgttatcaacttgaaaaagtggcaccgagtcggtgcgccagcagtgaacacccattgggcgtggcagtc

SEQ ID NO: 3049 - RNA, 129 nt, synthetic construct
  misc_feature 1..129: note = Description of Artificial Sequence: Synthetic polynucleotide
  source 1..129: mol_type = other RNA
tttggtgactgccacgcccagttttagagctagaaatagcaagttaaaataaggctagtccgttatcaacttgaaaaagtggcaccgagtcggtgcggaggccagcagtgaacaccctttgggcgtggc

SEQ ID NO: 3050 - RNA, 129 nt, synthetic construct
  misc_feature 1..129: note = Description of Artificial Sequence: Synthetic polynucleotide
  source 1..129: mol_type = other RNA
tttggtgactgccacgcccagttttagagctagaaatagcaagttaaaataaggctagtccgttatcaacttgaaaaagtggcaccgagtcggtgcaggccagcagtgaacaccccttgggcgtggcag

SEQ ID NO: 3051 - RNA, 129 nt, synthetic construct
  misc_feature 1..129: note = Description of Artificial Sequence: Synthetic polynucleotide
  source 1..129: mol_type = other RNA
tttggtgactgccacgcccagttttagagctagaaatagcaagttaaaataaggctagtccgttatcaacttgaaaaagtggcaccgagtcggtgcggaggccagcagtgaacacccgttgggcgtggc

SEQ ID NO: 3052 - RNA, 129 nt, synthetic construct
  misc_feature 1..129: note = Description of Artificial Sequence: Synthetic polynucleotide
  source 1..129: mol_type = other RNA
tttggtgactgccacgcccagttttagagctagaaatagcaagttaaaataaggctagtccgttatcaacttgaaaaagtggcaccgagtcggtgcaggccagcagtgaacacccattgggcgtggcag

SEQ ID NO: 3053 - RNA, 129 nt, synthetic construct
  misc_feature 1..129: note = Description of Artificial Sequence: Synthetic polynucleotide
  source 1..129: mol_type = other RNA
tttggtgactgccacgcccagttttagagctagaaatagcaagttaaaataaggctagtccgttatcaacttgaaaaagtggcaccgagtcggtgcgaggccagcagtgaacaccccttgggcgtggca

SEQ ID NO: 3054 - RNA, 129 nt, synthetic construct
  misc_feature 1..129: note = Description of Artificial Sequence: Synthetic polynucleotide
  source 1..129: mol_type = other RNA
tttggtgactgccacgcccagttttagagctagaaatagcaagttaaaataaggctagtccgttatcaacttgaaaaagtggcaccgagtcggtgcgaggccagcagtgaacaccctttgggcgtggca

SEQ ID NO: 3055 - RNA, 129 nt, synthetic construct
  misc_feature 1..129: note = Description of Artificial Sequence: Synthetic polynucleotide
  source 1..129: mol_type = other RNA
tttggtgactgccacgcccagttttagagctagaaatagcaagttaaaataaggctagtccgttatcaacttgaaaaagtggcaccgagtcggtgcggaggccagcagtgaacaccccttgggcgtggc

SEQ ID NO: 3056 - RNA, 129 nt, synthetic construct
  misc_feature 1..129: note = Description of Artificial Sequence: Synthetic polynucleotide
  source 1..129: mol_type = other RNA
gtttggtgactgccacgcccagttttagagctagaaatagcaagttaaaataaggctagtccgttatcaacttgaaaaagtggcaccgagtcggtgctgaacaccccttgggcgtggcagtcttttttt

SEQ ID NO: 3057 - RNA, 129 nt, synthetic construct
  misc_feature 1..129: note = Description of Artificial Sequence: Synthetic polynucleotide
  source 1..129: mol_type = other RNA
gtttggtgactgccacgcccagttttagagctagaaatagcaagttaaaataaggctagtccgttatcaacttgaaaaagtggcaccgagtcggtgcacacccgttgggcgtggcagtcaccttttttt

SEQ ID NO: 3058 - RNA, 129 nt, synthetic construct
  misc_feature 1..129: note = Description of Artificial Sequence: Synthetic polynucleotide
  source 1..129: mol_type = other RNA
gtttggtgactgccacgcccagttttagagctagaaatagcaagttaaaataaggctagtccgttatcaacttgaaaaagtggcaccgagtcggtgctgaacacccattgggcgtggcagtcatttttt

SEQ ID NO: 3059 - RNA, 129 nt, synthetic construct
  misc_feature 1..129: note = Description of Artificial Sequence: Synthetic polynucleotide
  source 1..129: mol_type = other RNA
tttggtgactgccacgcccagttttagagctagaaatagcaagttaaaataaggctagtccgttatcaacttgaaaaagtggcaccgagtcggtgcgaggccagcagtgaacacccattgggcgtggca

SEQ ID NO: 3060 - RNA, 129 nt, synthetic construct
  misc_feature 1..129: note = Description of Artificial Sequence: Synthetic polynucleotide
  source 1..129: mol_type = other RNA
gtttggtgactgccacgcccagttttagagctagaaatagcaagttaaaataaggctagtccgttatcaacttgaaaaagtggcaccgagtcggtgcgcagtgaacacccattgggcgtggcttttttt

SEQ ID NO: 3061 - RNA, 129 nt, synthetic construct
  misc_feature 1..129: note = Description of Artificial Sequence: Synthetic polynucleotide
  source 1..129: mol_type = other RNA
gtttggtgactgccacgcccagttttagagctagaaatagcaagttaaaataaggctagtccgttatcaacttgaaaaagtggcaccgagtcggtgctgaacacccgttgggcgtggcagtcatttttt

SEQ ID NO: 3062 - RNA, 129 nt, synthetic construct
  misc_feature 1..129: note = Description of Artificial Sequence: Synthetic polynucleotide
  source 1..129: mol_type = other RNA
gtttggtgactgccacgcccagttttagagctagaaatagcaagttaaaataaggctagtccgttatcaacttgaaaaagtggcaccgagtcggtgcgcagtgaacaccccttgggcgtggcatttttt

SEQ ID NO: 3063 - RNA, 129 nt, synthetic construct
  misc_feature 1..129: note = Description of Artificial Sequence: Synthetic polynucleotide
  source 1..129: mol_type = other RNA
gtttggtgactgccacgcccagttttagagctagaaatagcaagttaaaataaggctagtccgttatcaacttgaaaaagtggcaccgagtcggtgcgaacacccattgggcgtggcagtcattttttt

SEQ ID NO: 3064 - RNA, 129 nt, synthetic construct
  misc_feature 1..129: note = Description of Artificial Sequence: Synthetic polynucleotide
  source 1..129: mol_type = other RNA
tttggtgactgccacgcccagttttagagctagaaatagcaagttaaaataaggctagtccgttatcaacttgaaaaagtggcaccgagtcggtgcggccagcagtgaacaccctttgggcgtggcagt

SEQ ID NO: 3065 - RNA, 129 nt, synthetic construct
  misc_feature 1..129: note = Description of Artificial Sequence: Synthetic polynucleotide
  source 1..129: mol_type = other RNA
tttggtgactgccacgcccagttttagagctagaaatagcaagttaaaataaggctagtccgttatcaacttgaaaaagtggcaccgagtcggtgcgccagcagtgaacaccccttgggcgtggcagtc

SEQ ID NO: 3066 - RNA, 129 nt, synthetic construct
  misc_feature 1..129: note = Description of Artificial Sequence: Synthetic polynucleotide
  source 1..129: mol_type = other RNA
gtttggtgactgccacgcccagttttagagctagaaatagcaagttaaaataaggctagtccgttatcaacttgaaaaagtggcaccgagtcggtgcgcagtgaacaccctttgggcgtggcttttttt

SEQ ID NO: 3067 - RNA, 129 nt, synthetic construct
  misc_feature 1..129: note = Description of Artificial Sequence: Synthetic polynucleotide
  source 1..129: mol_type = other RNA
gtttggtgactgccacgcccagttttagagctagaaatagcaagttaaaataaggctagtccgttatcaacttgaaaaagtggcaccgagtcggtgcgaacaccccttgggcgtggcagtcattttttt

SEQ ID NO: 3068 - RNA, 129 nt, synthetic construct
  misc_feature 1..129: note = Description of Artificial Sequence: Synthetic polynucleotide
  source 1..129: mol_type = other RNA
gtttggtgactgccacgcccagttttagagctagaaatagcaagttaaaataaggctagtccgttatcaacttgaaaaagtggcaccgagtcggtgcgtgaacacccattgggcgtggcagtttttttt

SEQ ID NO: 3069 - RNA, 129 nt, synthetic construct
  misc_feature 1..129: note = Description of Artificial Sequence: Synthetic polynucleotide
  source 1..129: mol_type = other RNA
gtttggtgactgccacgcccagttttagagctagaaatagcaagttaaaataaggctagtccgttatcaacttgaaaaagtggcaccgagtcggtgcagtgaacacccattgggcgtggcagttttttt

SEQ ID NO: 3070 - RNA, 129 nt, synthetic construct
  misc_feature 1..129: note = Description of Artificial Sequence: Synthetic polynucleotide
  source 1..129: mol_type = other RNA
gtttggtgactgccacgcccagttttagagctagaaatagcaagttaaaataaggctagtccgttatcaacttgaaaaagtggcaccgagtcggtgcacaccccttgggcgtggcagtcaccttttttt

SEQ ID NO: 3071 - RNA, 129 nt, synthetic construct
  misc_feature 1..129: note = Description of Artificial Sequence: Synthetic polynucleotide
  source 1..129: mol_type = other RNA
tttggtgactgccacgcccagttttagagctagaaatagcaagttaaaataaggctagtccgttatcaacttgaaaaagtggcaccgagtcggtgcagcagtgaacaccctttgggcgtggcagtcacc

SEQ ID NO: 3072 - RNA, 129 nt, synthetic construct
  misc_feature 1..129: note = Description of Artificial Sequence: Synthetic polynucleotide
  source 1..129: mol_type = other RNA
tttggtgactgccacgcccagttttagagctagaaatagcaagttaaaataaggctagtccgttatcaacttgaaaaagtggcaccgagtcggtgcagcagtgaacacccattgggcgtggcagtcacc

SEQ ID NO: 3073 - RNA, 129 nt, synthetic construct
  misc_feature 1..129: note = Description of Artificial Sequence: Synthetic polynucleotide
  source 1..129: mol_type = other RNA
gtttggtgactgccacgcccagttttagagctagaaatagcaagttaaaataaggctagtccgttatcaacttgaaaaagtggcaccgagtcggtgcacacccattgggcgtggcagtcaccttttttt

SEQ ID NO: 3074 - RNA, 129 nt, synthetic construct
  misc_feature 1..129: note = Description of Artificial Sequence: Synthetic polynucleotide
  source 1..129: mol_type = other RNA
gtttggtgactgccacgcccagttttagagctagaaatagcaagttaaaataaggctagtccgttatcaacttgaaaaagtggcaccgagtcggtgcgtgaacaccccttgggcgtggcagtttttttt

SEQ ID NO: 3075 - RNA, 129 nt, synthetic construct
  misc_feature 1..129: note = Description of Artificial Sequence: Synthetic polynucleotide
  source 1..129: mol_type = other RNA
tttggtgactgccacgcccagttttagagctagaaatagcaagttaaaataaggctagtccgttatcaacttgaaaaagtggcaccgagtcggtgcggccagcagtgaacaccccttgggcgtggcagt

SEQ ID NO: 3076 - RNA, 129 nt, synthetic construct
  misc_feature 1..129: note = Description of Artificial Sequence: Synthetic polynucleotide
  source 1..129: mol_type = other RNA
tttggtgactgccacgcccagttttagagctagaaatagcaagttaaaataaggctagtccgttatcaacttgaaaaagtggcaccgagtcggtgcagcagtgaacaccccttgggcgtggcagtcacc

SEQ ID NO: 3077 - RNA, 129 nt, synthetic construct
  misc_feature 1..129: note = Description of Artificial Sequence: Synthetic polynucleotide
  source 1..129: mol_type = other RNA
gtttggtgactgccacgcccagttttagagctagaaatagcaagttaaaataaggctagtccgttatcaacttgaaaaagtggcaccgagtcggtgcgcagtgaacacccgttgggcgtggcatttttt

SEQ ID NO: 3078 - RNA, 129 nt, synthetic construct
  misc_feature 1..129: note = Description of Artificial Sequence: Synthetic polynucleotide
  source 1..129: mol_type = other RNA
gtttggtgactgccacgcccagttttagagctagaaatagcaagttaaaataaggctagtccgttatcaacttgaaaaagtggcaccgagtcggtgcgcagtgaacaccccttgggcgtggcttttttt

SEQ ID NO: 3079 - RNA, 129 nt, synthetic construct
  misc_feature 1..129: note = Description of Artificial Sequence: Synthetic polynucleotide
  source 1..129: mol_type = other RNA
tttggtgactgccacgcccagttttagagctagaaatagcaagttaaaataaggctagtccgttatcaacttgaaaaagtggcaccgagtcggtgcagcagtgaacatccgttgggcgtggcagttttt

SEQ ID NO: 3080 - RNA, 129 nt, synthetic construct
  misc_feature 1..129: note = Description of Artificial Sequence: Synthetic polynucleotide
  source 1..129: mol_type = other RNA
tttggtgactgccacgcccagttttagagctagaaatagcaagttaaaataaggctagtccgttatcaacttgaaaaagtggcaccgagtcggtgcagcagtgaacacccgttgggcgtggcagtcacc

SEQ ID NO: 3081 - RNA, 129 nt, synthetic construct
  misc_feature 1..129: note = Description of Artificial Sequence: Synthetic polynucleotide
  source 1..129: mol_type = other RNA
gtttggtgactgccacgcccagttttagagctagaaatagcaagttaaaataaggctagtccgttatcaacttgaaaaagtggcaccgagtcggtgcaacacccattgggcgtggcagtcacctttttt

SEQ ID NO: 3082 - RNA, 129 nt, synthetic construct
  misc_feature 1..129: note = Description of Artificial Sequence: Synthetic polynucleotide
  source 1..129: mol_type = other RNA
tttggtgactgccacgcccagttttagagctagaaatagcaagttaaaataaggctagtccgttatcaacttgaaaaagtggcaccgagtcggtgcagcagtgaacatcccttgggcgtggcagtcacc

SEQ ID NO: 3083 - RNA, 129 nt, synthetic construct
  misc_feature 1..129: note = Description of Artificial Sequence: Synthetic polynucleotide
  source 1..129: mol_type = other RNA
tttggtgactgccacgcccagttttagagctagaaatagcaagttaaaataaggctagtccgttatcaacttgaaaaagtggcaccgagtcggtgcagcagtgaacatcccttgggcgtggcagttttt

SEQ ID NO: 3084 - RNA, 129 nt, synthetic construct
  misc_feature 1..129: note = Description of Artificial Sequence: Synthetic polynucleotide
  source 1..129: mol_type = other RNA
tttggtgactgccacgcccagttttagagctagaaatagcaagttaaaataaggctagtccgttatcaacttgaaaaagtggcaccgagtcggtgcagcagtgaacatccgttgggcgtggcagtcacc

SEQ ID NO: 3085 - RNA, 129 nt, synthetic construct
  misc_feature 1..129: note = Description of Artificial Sequence: Synthetic polynucleotide
  source 1..129: mol_type = other RNA
gtttggtgactgccacgcccagttttagagctagaaatagcaagttaaaataaggctagtccgttatcaacttgaaaaagtggcaccgagtcggtgctgaacaccccttgggcgtggcagtcatttttt

SEQ ID NO: 3086 - RNA, 129 nt, synthetic construct
  misc_feature 1..129: note = Description of Artificial Sequence: Synthetic polynucleotide
  source 1..129: mol_type = other RNA
gtttggtgactgccacgcccagttttagagctagaaatagcaagttaaaataaggctagtccgttatcaacttgaaaaagtggcaccgagtcggtgctgaacacccattgggcgtggcagtcttttttt

SEQ ID NO: 3087 - RNA, 129 nt, synthetic construct
  misc_feature 1..129: note = Description of Artificial Sequence: Synthetic polynucleotide
  source 1..129: mol_type = other RNA
gtttggtgactgccacgcccagttttagagctagaaatagcaagttaaaataaggctagtccgttatcaacttgaaaaagtggcaccgagtcggtgcgaacacccgttgggcgtggcagtcattttttt

SEQ ID NO: 3088 - RNA, 129 nt, synthetic construct
  misc_feature 1..129: note = Description of Artificial Sequence: Synthetic polynucleotide
  source 1..129: mol_type = other RNA
gtttggtgactgccacgcccagttttagagctagaaatagcaagttaaaataaggctagtccgttatcaacttgaaaaagtggcaccgagtcggtgcgcagtgaacacccgttgggcgtggcttttttt

SEQ ID NO: 3089 - RNA, 129 nt, synthetic construct
  misc_feature 1..129: note = Description of Artificial Sequence: Synthetic polynucleotide
  source 1..129: mol_type = other RNA
tttggtgactgccacgcccagttttagagctagaaatagcaagttaaaataaggctagtccgttatcaacttgaaaaagtggcaccgagtcggtgcgaacatccgttgggcgtggcagtcaccaatttt

SEQ ID NO: 3090 - RNA, 129 nt, synthetic construct
  misc_feature 1..129: note = Description of Artificial Sequence: Synthetic polynucleotide
  source 1..129: mol_type = other RNA
gtttggtgactgccacgcccagttttagagctagaaatagcaagttaaaataaggctagtccgttatcaacttgaaaaagtggcaccgagtcggtgcagtgaacaccctttgggcgtggcagttttttt

SEQ ID NO: 3091 - RNA, 129 nt, synthetic construct
  misc_feature 1..129: note = Description of Artificial Sequence: Synthetic polynucleotide
  source 1..129: mol_type = other RNA
gtttggtgactgccacgcccagttttagagctagaaatagcaagttaaaataaggctagtccgttatcaacttgaaaaagtggcaccgagtcggtgcgtgaacaccctttgggcgtggcagtttttttt

SEQ ID NO: 3092 - RNA, 129 nt, synthetic construct
  misc_feature 1..129: note = Description of Artificial Sequence: Synthetic polynucleotide
  source 1..129: mol_type = other RNA
gtttggtgactgccacgcccagttttagagctagaaatagcaagttaaaataaggctagtccgttatcaacttgaaaaagtggcaccgagtcggtgctgaacacccgttgggcgtggcagtcttttttt

SEQ ID NO: 3093 - RNA, 129 nt, synthetic construct
  misc_feature 1..129: note = Description of Artificial Sequence: Synthetic polynucleotide
  source 1..129: mol_type = other RNA
tttggtgactgccacgcccagttttagagctagaaatagcaagttaaaataaggctagtccgttatcaacttgaaaaagtggcaccgagtcggtgcgccagcagtgaacaccctttgggcgtggcagtc

SEQ ID NO: 3094 - RNA, 129 nt, synthetic construct
  misc_feature 1..129: note = Description of Artificial Sequence: Synthetic polynucleotide
  source 1..129: mol_type = other RNA
gtttggtgactgccacgcccagttttagagctagaaatagcaagttaaaataaggctagtccgttatcaacttgaaaaagtggcaccgagtcggtgcgaacaccctttgggcgtggcagtcattttttt

SEQ ID NO: 3095 - RNA, 129 nt, synthetic construct
  misc_feature 1..129: note = Description of Artificial Sequence: Synthetic polynucleotide
  source 1..129: mol_type = other RNA
gtttggtgactgccacgcccagttttagagctagaaatagcaagttaaaataaggctagtccgttatcaacttgaaaaagtggcaccgagtcggtgcaacaccctttgggcgtggcagtcacttttttt

SEQ ID NO: 3096 - RNA, 129 nt, synthetic construct
  misc_feature 1..129: note = Description of Artificial Sequence: Synthetic polynucleotide
  source 1..129: mol_type = other RNA
tttggtgactgccacgcccagttttagagctagaaatagcaagttaaaataaggctagtccgttatcaacttgaaaaagtggcaccgagtcggtgcgccagcagtgaacacccgttgggcgtggcagtc

SEQ ID NO: 3097 - RNA, 129 nt, synthetic construct
  misc_feature 1..129: note = Description of Artificial Sequence: Synthetic polynucleotide
  source 1..129: mol_type = other RNA
gtttggtgactgccacgcccagttttagagctagaaatagcaagttaaaataaggctagtccgttatcaacttgaaaaagtggcaccgagtcggtgcagtgaacaccccttgggcgtggcagttttttt

SEQ ID NO: 3098 - RNA, 129 nt, synthetic construct
  misc_feature 1..129: note = Description of Artificial Sequence: Synthetic polynucleotide
  source 1..129: mol_type = other RNA
tttggtgactgccacgcccagttttagagctagaaatagcaagttaaaataaggctagtccgttatcaacttgaaaaagtggcaccgagtcggtgcgaggccagcagtgaacacccgttgggcgtggca

SEQ ID NO: 3099 - RNA, 129 nt, synthetic construct
  misc_feature 1..129: note = Description of Artificial Sequence: Synthetic polynucleotide
  source 1..129: mol_type = other RNA
tttggtgactgccacgcccagttttagagctagaaatagcaagttaaaataaggctagtccgttatcaacttgaaaaagtggcaccgagtcggtgcaggccagcagtgaacaccctttgggcgtggcag

SEQ ID NO: 3100 - RNA, 129 nt, synthetic construct
  misc_feature 1..129: note = Description of Artificial Sequence: Synthetic polynucleotide
  source 1..129: mol_type = other RNA
tttggtgactgccacgcccagttttagagctagaaatagcaagttaaaataaggctagtccgttatcaacttgaaaaagtggcaccgagtcggtgcgtgaacatcccttgggcgtggcagtcacctttt

SEQ ID NO: 3101 - RNA, 129 nt, synthetic construct
  misc_feature 1..129: note = Description of Artificial Sequence: Synthetic polynucleotide
  source 1..129: mol_type = other RNA
tttggtgactgccacgcccagttttagagctagaaatagcaagttaaaataaggctagtccgttatcaacttgaaaaagtggcaccgagtcggtgcggccagcagtgaacacccattgggcgtggcagt

SEQ ID NO: 3102 - RNA, 129 nt, synthetic construct
  misc_feature 1..129: note = Description of Artificial Sequence: Synthetic polynucleotide
  source 1..129: mol_type = other RNA
gtttggtgactgccacgcccagttttagagctagaaatagcaagttaaaataaggctagtccgttatcaacttgaaaaagtggcaccgagtcggtgcaacaccctttgggcgtggcagtcacctttttt

SEQ ID NO: 3103 - RNA, 129 nt, synthetic construct
  misc_feature 1..129: note = Description of Artificial Sequence: Synthetic polynucleotide
  source 1..129: mol_type = other RNA
gtttggtgactgccacgcccagttttagagctagaaatagcaagttaaaataaggctagtccgttatcaacttgaaaaagtggcaccgagtcggtgcaacaccccttgggcgtggcagtcacttttttt

SEQ ID NO: 3104 - RNA, 129 nt, synthetic construct
  misc_feature 1..129: note = Description of Artificial Sequence: Synthetic polynucleotide
  source 1..129: mol_type = other RNA
gtttggtgactgccacgcccagttttagagctagaaatagcaagttaaaataaggctagtccgttatcaacttgaaaaagtggcaccgagtcggtgcaacaccccttgggcgtggcagtcacctttttt

SEQ ID NO: 3105 - RNA, 129 nt, synthetic construct
  misc_feature 1..129: note = Description of Artificial Sequence: Synthetic polynucleotide
  source 1..129: mol_type = other RNA
tttggtgactgccacgcccagttttagagctagaaatagcaagttaaaataaggctagtccgttatcaacttgaaaaagtggcaccgagtcggtgcgtgaacatccgttgggcgtggcagtcacctttt

SEQ ID NO: 3106 - RNA, 129 nt, synthetic construct
  misc_feature 1..129: note = Description of Artificial Sequence: Synthetic polynucleotide
  source 1..129: mol_type = other RNA
gtttggtgactgccacgcccagttttagagctagaaatagcaagttaaaataaggctagtccgttatcaacttgaaaaagtggcaccgagtcggtgcgcagtgaacacccattgggcgtggcatttttt

SEQ ID NO: 3107 - RNA, 129 nt, synthetic construct
  misc_feature 1..129: note = Description of Artificial Sequence: Synthetic polynucleotide
  source 1..129: mol_type = other RNA
gtttggtgactgccacgcccagttttagagctagaaatagcaagttaaaataaggctagtccgttatcaacttgaaaaagtggcaccgagtcggtgctgaacaccctttgggcgtggcagtcatttttt

SEQ ID NO: 3108 - RNA, 129 nt, synthetic construct
  misc_feature 1..129: note = Description of Artificial Sequence: Synthetic polynucleotide
  source 1..129: mol_type = other RNA
tttggtgactgccacgcccagttttagagctagaaatagcaagttaaaataaggctagtccgttatcaacttgaaaaagtggcaccgagtcggtgcgaacatcccttgggcgtggcagtcaccaatttt

SEQ ID NO: 3109 - RNA, 129 nt, synthetic construct
  misc_feature 1..129: note = Description of Artificial Sequence: Synthetic polynucleotide
  source 1..129: mol_type = other RNA
gtttggtgactgccacgcccagttttagagctagaaatagcaagttaaaataaggctagtccgttatcaacttgaaaaagtggcaccgagtcggtgcgtgaacacccgttgggcgtggcagtttttttt

SEQ ID NO: 3110 - RNA, 129 nt, synthetic construct
  misc_feature 1..129: note = Description of Artificial Sequence: Synthetic polynucleotide
  source 1..129: mol_type = other RNA
gtttggtgactgccacgcccagttttagagctagaaatagcaagttaaaataaggctagtccgttatcaacttgaaaaagtggcaccgagtcggtgctgaacaccctttgggcgtggcagtcttttttt

SEQ ID NO: 3111 - RNA, 129 nt, synthetic construct
  misc_feature 1..129: note = Description of Artificial Sequence: Synthetic polynucleotide
  source 1..129: mol_type = other RNA
gtttggtgactgccacgcccagttttagagctagaaatagcaagttaaaataaggctagtccgttatcaacttgaaaaagtggcaccgagtcggtgcagtgaacacccgttgggcgtggcagttttttt

SEQ ID NO: 3112 - RNA, 129 nt, synthetic construct
  misc_feature 1..129: note = Description of Artificial Sequence: Synthetic polynucleotide
  source 1..129: mol_type = other RNA
gtttggtgactgccacgcccagttttagagctagaaatagcaagttaaaataaggctagtccgttatcaacttgaaaaagtggcaccgagtcggtgcaacacccgttgggcgtggcagtcacttttttt

SEQ ID NO: 3113 - RNA, 129 nt, synthetic construct
  misc_feature 1..129: note = Description of Artificial Sequence: Synthetic polynucleotide
  source 1..129: mol_type = other RNA
gtttggtgactgccacgcccagttttagagctagaaatagcaagttaaaataaggctagtccgttatcaacttgaaaaagtggcaccgagtcggtgcaacacccgttgggcgtggcagtcacctttttt

SEQ ID NO: 3114 - RNA, 129 nt, synthetic construct
  misc_feature 1..129: note = Description of Artificial Sequence: Synthetic polynucleotide
  source 1..129: mol_type = other RNA
gtttggtgactgccacgcccagttttagagctagaaatagcaagttaaaataaggctagtccgttatcaacttgaaaaagtggcaccgagtcggtgcacaccctttgggcgtggcagtcaccttttttt

SEQ ID NO: 3115 - RNA, 129 nt, synthetic construct
  misc_feature 1..129: note = Description of Artificial Sequence: Synthetic polynucleotide
  source 1..129: mol_type = other RNA
gtttggtgactgccacgcccagttttagagctagaaatagcaagttaaaataaggctagtccgttatcaacttgaaaaagtggcaccgagtcggtgcaacacccattgggcgtggcagtcacttttttt

SEQ ID NO: 3116 - RNA, 130 nt, synthetic construct
  misc_feature 1..130: note = Description of Artificial Sequence: Synthetic polynucleotide
  source 1..130: mol_type = other RNA
gtttggtgactgccacgcccagttttagagctagaaatagcaagttaaaataaggctagtccgttatcaacttgaaaaagtggcaccgagtcggtgctgaacacccgttgggcgtggcagtcattttttt

SEQ ID NO: 3117 - RNA, 130 nt, synthetic construct
  misc_feature 1..130: note = Description of Artificial Sequence: Synthetic polynucleotide
  source 1..130: mol_type = other RNA
gtttggtgactgccacgcccagttttagagctagaaatagcaagttaaaataaggctagtccgttatcaacttgaaaaagtggcaccgagtcggtgcgtgaacaccccttgggcgtggcagtcatttttt

SEQ ID NO: 3118 - RNA, 130 nt, synthetic construct
  misc_feature 1..130: note = Description of Artificial Sequence: Synthetic polynucleotide
  source 1..130: mol_type = other RNA
gtttggtgactgccacgcccagttttagagctagaaatagcaagttaaaataaggctagtccgttatcaacttgaaaaagtggcaccgagtcggtgcagcagtgaacacccgttgggcgtggcttttttt

SEQ ID NO: 3119 - RNA, 130 nt, synthetic construct
  misc_feature 1..130: note = Description of Artificial Sequence: Synthetic polynucleotide
  source 1..130: mol_type = other RNA
tttggtgactgccacgcccagttttagagctagaaatagcaagttaaaataaggctagtccgttatcaacttgaaaaagtggcaccgagtcggtgcgccagcagtgaacatcccttgggcgtggcagtca

SEQ ID NO: 3120 - RNA, 130 nt, synthetic construct
  misc_feature 1..130: note = Description of Artificial Sequence: Synthetic polynucleotide
  source 1..130: mol_type = other RNA
tttggtgactgccacgcccagttttagagctagaaatagcaagttaaaataaggctagtccgttatcaacttgaaaaagtggcaccgagtcggtgcgccagcagtgaacatcccttgggcgtggcatttt

SEQ ID NO: 3121 - RNA, 130 nt, synthetic construct
  misc_feature 1..130: note = Description of Artificial Sequence: Synthetic polynucleotide
  source 1..130: mol_type = other RNA
tttggtgactgccacgcccagttttagagctagaaatagcaagttaaaataaggctagtccgttatcaacttgaaaaagtggcaccgagtcggtgcgaggccagcagtgaacaccctttgggcgtggcag

SEQ ID NO: 3122 - RNA, 130 nt, synthetic construct
  misc_feature 1..130: note = Description of Artificial Sequence: Synthetic polynucleotide
  source 1..130: mol_type = other RNA
tttggtgactgccacgcccagttttagagctagaaatagcaagttaaaataaggctagtccgttatcaacttgaaaaagtggcaccgagtcggtgcgccagcagtgaacaccctttgggcgtggcagtca

SEQ ID NO: 3123 - RNA, 130 nt, synthetic construct
  misc_feature 1..130: note = Description of Artificial Sequence: Synthetic polynucleotide
  source 1..130: mol_type = other RNA
tttggtgactgccacgcccagttttagagctagaaatagcaagttaaaataaggctagtccgttatcaacttgaaaaagtggcaccgagtcggtgcgcagtgaacacccgttgggcgtggcagtcaccaa

SEQ ID NO: 3124 - RNA, 130 nt, synthetic construct
  misc_feature 1..130: note = Description of Artificial Sequence: Synthetic polynucleotide
  source 1..130: mol_type = other RNA
tttggtgactgccacgcccagttttagagctagaaatagcaagttaaaataaggctagtccgttatcaacttgaaaaagtggcaccgagtcggtgcgaggccagcagtgaacacccgttgggcgtggcag

SEQ ID NO: 3125 - RNA, 130 nt, synthetic construct
  misc_feature 1..130: note = Description of Artificial Sequence: Synthetic polynucleotide
  source 1..130: mol_type = other RNA
gtttggtgactgccacgcccagttttagagctagaaatagcaagttaaaataaggctagtccgttatcaacttgaaaaagtggcaccgagtcggtgcaacacccattgggcgtggcagtcaccttttttt

SEQ ID NO: 3126 - RNA, 130 nt, synthetic construct
  misc_feature 1..130: note = Description of Artificial Sequence: Synthetic polynucleotide
  source 1..130: mol_type = other RNA
tttggtgactgccacgcccagttttagagctagaaatagcaagttaaaataaggctagtccgttatcaacttgaaaaagtggcaccgagtcggtgcaggccagcagtgaacacccattgggcgtggcagt

SEQ ID NO: 3127 - RNA, 130 nt, synthetic construct
  misc_feature 1..130: note = Description of Artificial Sequence: Synthetic polynucleotide
  source 1..130: mol_type = other RNA
tttggtgactgccacgcccagttttagagctagaaatagcaagttaaaataaggctagtccgttatcaacttgaaaaagtggcaccgagtcggtgcagtgaacatccgttgggcgtggcagtcacctttt

SEQ ID NO: 3128 - RNA, 130 nt, synthetic construct
  misc_feature 1..130: note = Description of Artificial Sequence: Synthetic polynucleotide
  source 1..130: mol_type = other RNA
tttggtgactgccacgcccagttttagagctagaaatagcaagttaaaataaggctagtccgttatcaacttgaaaaagtggcaccgagtcggtgcaggccagcagtgaacaccctttgggcgtggcagt

SEQ ID NO: 3129 - RNA, 130 nt, synthetic construct
  misc_feature 1..130: note = Description of Artificial Sequence: Synthetic polynucleotide
  source 1..130: mol_type = other RNA
gtttggtgactgccacgcccagttttagagctagaaatagcaagttaaaataaggctagtccgttatcaacttgaaaaagtggcaccgagtcggtgcagcagtgaacaccccttgggcgtggcttttttt

SEQ ID NO: 3130 - RNA, 130 nt, synthetic construct
  misc_feature 1..130: note = Description of Artificial Sequence: Synthetic polynucleotide
  source 1..130: mol_type = other RNA
tttggtgactgccacgcccagttttagagctagaaatagcaagttaaaataaggctagtccgttatcaacttgaaaaagtggcaccgagtcggtgcggccagcagtgaacaccccttgggcgtggcagtc

SEQ ID NO: 3131 - RNA, 130 nt, synthetic construct
  misc_feature 1..130: note = Description of Artificial Sequence: Synthetic polynucleotide
  source 1..130: mol_type = other RNA
gtttggtgactgccacgcccagttttagagctagaaatagcaagttaaaataaggctagtccgttatcaacttgaaaaagtggcaccgagtcggtgcagcagtgaacaccccttgggcgtggcatttttt

SEQ ID NO: 3132 - RNA, 130 nt, synthetic construct
  misc_feature 1..130: note = Description of Artificial Sequence: Synthetic polynucleotide
  source 1..130: mol_type = other RNA
gtttggtgactgccacgcccagttttagagctagaaatagcaagttaaaataaggctagtccgttatcaacttgaaaaagtggcaccgagtcggtgcaacacccgttgggcgtggcagtcaccttttttt

SEQ ID NO: 3133 - RNA, 130 nt, synthetic construct
  misc_feature 1..130: note = Description of Artificial Sequence: Synthetic polynucleotide
  source 1..130: mol_type = other RNA
tttggtgactgccacgcccagttttagagctagaaatagcaagttaaaataaggctagtccgttatcaacttgaaaaagtggcaccgagtcggtgcggccagcagtgaacacccattgggcgtggcagtc

SEQ ID NO: 3134 - RNA, 130 nt, synthetic construct
  misc_feature 1..130: note = Description of Artificial Sequence: Synthetic polynucleotide
  source 1..130: mol_type = other RNA
gtttggtgactgccacgcccagttttagagctagaaatagcaagttaaaataaggctagtccgttatcaacttgaaaaagtggcaccgagtcggtgcgtgaacaccctttgggcgtggcagtcttttttt

SEQ ID NO: 3135 - RNA, 130 nt, synthetic construct
  misc_feature 1..130: note = Description of Artificial Sequence: Synthetic polynucleotide
  source 1..130: mol_type = other RNA
gtttggtgactgccacgcccagttttagagctagaaatagcaagttaaaataaggctagtccgttatcaacttgaaaaagtggcaccgagtcggtgctgaacaccccttgggcgtggcagtcattttttt

SEQ ID NO: 3136 - RNA, 130 nt, synthetic construct
  misc_feature 1..130: note = Description of Artificial Sequence: Synthetic polynucleotide
  source 1..130: mol_type = other RNA
gtttggtgactgccacgcccagttttagagctagaaatagcaagttaaaataaggctagtccgttatcaacttgaaaaagtggcaccgagtcggtgcgtgaacacccgttgggcgtggcagtcttttttt

SEQ ID NO: 3137 - RNA, 130 nt, synthetic construct
  misc_feature 1..130: note = Description of Artificial Sequence: Synthetic polynucleotide
  source 1..130: mol_type = other RNA
tttggtgactgccacgcccagttttagagctagaaatagcaagttaaaataaggctagtccgttatcaacttgaaaaagtggcaccgagtcggtgctgaacatccgttgggcgtggcagtcaccaatttt

SEQ ID NO: 3138 - RNA, 130 nt, synthetic construct
  misc_feature 1..130: note = Description of Artificial Sequence: Synthetic polynucleotide
  source 1..130: mol_type = other RNA
gtttggtgactgccacgcccagttttagagctagaaatagcaagttaaaataaggctagtccgttatcaacttgaaaaagtggcaccgagtcggtgcagcagtgaacacccattgggcgtggcttttttt

SEQ ID NO: 3139 - RNA, 130 nt, synthetic construct
  misc_feature 1..130: note = Description of Artificial Sequence: Synthetic polynucleotide
  source 1..130: mol_type = other RNA
gtttggtgactgccacgcccagttttagagctagaaatagcaagttaaaataaggctagtccgttatcaacttgaaaaagtggcaccgagtcggtgcagcagtgaacacccattgggcgtggcatttttt

SEQ ID NO: 3140 - RNA, 130 nt, synthetic construct
  misc_feature 1..130: note = Description of Artificial Sequence: Synthetic polynucleotide
  source 1..130: mol_type = other RNA
gtttggtgactgccacgcccagttttagagctagaaatagcaagttaaaataaggctagtccgttatcaacttgaaaaagtggcaccgagtcggtgcagtgaacacccgttgggcgtggcagtttttttt

SEQ ID NO: 3141 - RNA, 130 nt, synthetic construct
  misc_feature 1..130: note = Description of Artificial Sequence: Synthetic polynucleotide
  source 1..130: mol_type = other RNA
gtttggtgactgccacgcccagttttagagctagaaatagcaagttaaaataaggctagtccgttatcaacttgaaaaagtggcaccgagtcggtgcaacaccccttgggcgtggcagtcaccttttttt

SEQ ID NO: 3142 - RNA, 130 nt, synthetic construct
  misc_feature 1..130: note = Description of Artificial Sequence: Synthetic polynucleotide
  source 1..130: mol_type = other RNA
tttggtgactgccacgcccagttttagagctagaaatagcaagttaaaataaggctagtccgttatcaacttgaaaaagtggcaccgagtcggtgcaggccagcagtgaacaccccttgggcgtggcagt

SEQ ID NO: 3143 - RNA, 130 nt, synthetic construct
  misc_feature 1..130: note = Description of Artificial Sequence: Synthetic polynucleotide
  source 1..130: mol_type = other RNA
gtttggtgactgccacgcccagttttagagctagaaatagcaagttaaaataaggctagtccgttatcaacttgaaaaagtggcaccgagtcggtgcgtgaacaccccttgggcgtggcagtcttttttt

SEQ ID NO: 3144 - RNA, 130 nt, synthetic construct
  misc_feature 1..130: note = Description of Artificial Sequence: Synthetic polynucleotide
  source 1..130: mol_type = other RNA
tttggtgactgccacgcccagttttagagctagaaatagcaagttaaaataaggctagtccgttatcaacttgaaaaagtggcaccgagtcggtgcgcagtgaacaccccttgggcgtggcagtcaccaa

SEQ ID NO: 3145 - RNA, 130 nt, synthetic construct
  misc_feature 1..130: note = Description of Artificial Sequence: Synthetic polynucleotide
  source 1..130: mol_type = other RNA
gtttggtgactgccacgcccagttttagagctagaaatagcaagttaaaataaggctagtccgttatcaacttgaaaaagtggcaccgagtcggtgcagcagtgaacacccgttgggcgtggcatttttt

SEQ ID NO: 3146 - RNA, 130 nt, synthetic construct
  misc_feature 1..130: note = Description of Artificial Sequence: Synthetic polynucleotide
  source 1..130: mol_type = other RNA
gtttggtgactgccacgcccagttttagagctagaaatagcaagttaaaataaggctagtccgttatcaacttgaaaaagtggcaccgagtcggtgcacacccattgggcgtggcagtcaccaatttttt

SEQ ID NO: 3147 - RNA, 130 nt, synthetic construct
  misc_feature 1..130: note = Description of Artificial Sequence: Synthetic polynucleotide
  source 1..130: mol_type = other RNA
gtttggtgactgccacgcccagttttagagctagaaatagcaagttaaaataaggctagtccgttatcaacttgaaaaagtggcaccgagtcggtgcgtgaacaccctttgggcgtggcagtcatttttt

SEQ ID NO: 3148 - RNA, 130 nt, synthetic construct
  misc_feature 1..130: note = Description of Artificial Sequence: Synthetic polynucleotide
  source 1..130: mol_type = other RNA
tttggtgactgccacgcccagttttagagctagaaatagcaagttaaaataaggctagtccgttatcaacttgaaaaagtggcaccgagtcggtgcgcagtgaacaccctttgggcgtggcagtcaccaa

SEQ ID NO: 3149 - RNA, 130 nt, synthetic construct
  misc_feature 1..130: note = Description of Artificial Sequence: Synthetic polynucleotide
  source 1..130: mol_type = other RNA
tttggtgactgccacgcccagttttagagctagaaatagcaagttaaaataaggctagtccgttatcaacttgaaaaagtggcaccgagtcggtgctgaacatcccttgggcgtggcagtcaccaatttt

SEQ ID NO: 3150 - RNA, 130 nt, synthetic construct
  misc_feature 1..130: note = Description of Artificial Sequence: Synthetic polynucleotide
  source 1..130: mol_type = other RNA
gtttggtgactgccacgcccagttttagagctagaaatagcaagttaaaataaggctagtccgttatcaacttgaaaaagtggcaccgagtcggtgcagcagtgaacaccctttgggcgtggcatttttt

SEQ ID NO: 3151 - RNA, 130 nt, synthetic construct
  misc_feature 1..130: note = Description of Artificial Sequence: Synthetic polynucleotide
  source 1..130: mol_type = other RNA
gtttggtgactgccacgcccagttttagagctagaaatagcaagttaaaataaggctagtccgttatcaacttgaaaaagtggcaccgagtcggtgcagcagtgaacaccctttgggcgtggcttttttt

SEQ ID NO: 3152 - RNA, 130 nt, synthetic construct
  misc_feature 1..130: note = Description of Artificial Sequence: Synthetic polynucleotide
  source 1..130: mol_type = other RNA
gtttggtgactgccacgcccagttttagagctagaaatagcaagttaaaataaggctagtccgttatcaacttgaaaaagtggcaccgagtcggtgcgaacaccccttgggcgtggcagtcacttttttt

SEQ ID NO: 3153 - RNA, 130 nt, synthetic construct
  misc_feature 1..130: note = Description of Artificial Sequence: Synthetic polynucleotide
  source 1..130: mol_type = other RNA
gtttggtgactgccacgcccagttttagagctagaaatagcaagttaaaataaggctagtccgttatcaacttgaaaaagtggcaccgagtcggtgcgcagtgaacaccctttgggcgtggcattttttt

SEQ ID NO: 3154 - RNA, 130 nt, synthetic construct
  misc_feature 1..130: note = Description of Artificial Sequence: Synthetic polynucleotide
  source 1..130: mol_type = other RNA
gtttggtgactgccacgcccagttttagagctagaaatagcaagttaaaataaggctagtccgttatcaacttgaaaaagtggcaccgagtcggtgcgaacacccattgggcgtggcagtcacctttttt

SEQ ID NO: 3155 - RNA, 130 nt, synthetic construct
  misc_feature 1..130: note = Description of Artificial Sequence: Synthetic polynucleotide
  source 1..130: mol_type = other RNA
gtttggtgactgccacgcccagttttagagctagaaatagcaagttaaaataaggctagtccgttatcaacttgaaaaagtggcaccgagtcggtgctgaacaccctttgggcgtggcagtcattttttt

SEQ ID NO: 3156 - RNA, 130 nt, synthetic construct
  misc_feature 1..130: note = Description of Artificial Sequence: Synthetic polynucleotide
  source 1..130: mol_type = other RNA
gtttggtgactgccacgcccagttttagagctagaaatagcaagttaaaataaggctagtccgttatcaacttgaaaaagtggcaccgagtcggtgcgaacaccccttgggcgtggcagtcacctttttt

SEQ ID NO: 3157 - RNA, 130 nt, synthetic construct
  misc_feature 1..130: note = Description of Artificial Sequence: Synthetic polynucleotide
  source 1..130: mol_type = other RNA
gtttggtgactgccacgcccagttttagagctagaaatagcaagttaaaataaggctagtccgttatcaacttgaaaaagtggcaccgagtcggtgcgaacacccgttgggcgtggcagtcacttttttt

SEQ ID NO: 3158 - RNA, 130 nt, synthetic construct
  misc_feature 1..130: note = Description of Artificial Sequence: Synthetic polynucleotide
  source 1..130: mol_type = other RNA
gtttggtgactgccacgcccagttttagagctagaaatagcaagttaaaataaggctagtccgttatcaacttgaaaaagtggcaccgagtcggtgcagtgaacacccattgggcgtggcagtttttttt

SEQ ID NO: 3159 - RNA, 130 nt, synthetic construct
  misc_feature 1..130: note = Description of Artificial Sequence: Synthetic polynucleotide
  source 1..130: mol_type = other RNA
tttggtgactgccacgcccagttttagagctagaaatagcaagttaaaataaggctagtccgttatcaacttgaaaaagtggcaccgagtcggtgcggaggccagcagtgaacacccattgggcgtggca

SEQ ID NO: 3160 - RNA, 130 nt, synthetic construct
  misc_feature 1..130: note = Description of Artificial Sequence: Synthetic polynucleotide
  source 1..130: mol_type = other RNA
gtttggtgactgccacgcccagttttagagctagaaatagcaagttaaaataaggctagtccgttatcaacttgaaaaagtggcaccgagtcggtgcgaacacccgttgggcgtggcagtcacctttttt

SEQ ID NO: 3161 - RNA, 130 nt, synthetic construct
  misc_feature 1..130: note = Description of Artificial Sequence: Synthetic polynucleotide
  source 1..130: mol_type = other RNA
tttggtgactgccacgcccagttttagagctagaaatagcaagttaaaataaggctagtccgttatcaacttgaaaaagtggcaccgagtcggtgcggccagcagtgaacacccgttgggcgtggcagtc

SEQ ID NO: 3162 - RNA, 130 nt, synthetic construct
  misc_feature 1..130: note = Description of Artificial Sequence: Synthetic polynucleotide
  source 1..130: mol_type = other RNA
tttggtgactgccacgcccagttttagagctagaaatagcaagttaaaataaggctagtccgttatcaacttgaaaaagtggcaccgagtcggtgcggaggccagcagtgaacaccctttgggcgtggca

SEQ ID NO: 3163 - RNA, 130 nt, synthetic construct
  misc_feature 1..130: note = Description of Artificial Sequence: Synthetic polynucleotide
  source 1..130: mol_type = other RNA
tttggtgactgccacgcccagttttagagctagaaatagcaagttaaaataaggctagtccgttatcaacttgaaaaagtggcaccgagtcggtgcgccagcagtgaacaccccttgggcgtggcagtca

SEQ ID NO: 3164 - RNA, 130 nt, synthetic construct
  misc_feature 1..130: note = Description of Artificial Sequence: Synthetic polynucleotide
  source 1..130: mol_type = other RNA
tttggtgactgccacgcccagttttagagctagaaatagcaagttaaaataaggctagtccgttatcaacttgaaaaagtggcaccgagtcggtgcggccagcagtgaacaccctttgggcgtggcagtc

SEQ ID NO: 3165 - RNA, 130 nt, synthetic construct
  misc_feature 1..130: note = Description of Artificial Sequence: Synthetic polynucleotide
  source 1..130: mol_type = other RNA
tttggtgactgccacgcccagttttagagctagaaatagcaagttaaaataaggctagtccgttatcaacttgaaaaagtggcaccgagtcggtgcgcagtgaacacccattgggcgtggcagtcaccaa

SEQ ID NO: 3166 - RNA, 130 nt, synthetic construct
  misc_feature 1..130: note = Description of Artificial Sequence: Synthetic polynucleotide
  source 1..130: mol_type = other RNA
tttggtgactgccacgcccagttttagagctagaaatagcaagttaaaataaggctagtccgttatcaacttgaaaaagtggcaccgagtcggtgcgccagcagtgaacacccattgggcgtggcagtca

SEQ ID NO: 3167 - RNA, 130 nt, synthetic construct
  misc_feature 1..130: note = Description of Artificial Sequence: Synthetic polynucleotide
  source 1..130: mol_type = other RNA
tttggtgactgccacgcccagttttagagctagaaatagcaagttaaaataaggctagtccgttatcaacttgaaaaagtggcaccgagtcggtgcgcagtgaacatccgttgggcgtggcagtcatttt

SEQ ID NO: 3168 - RNA, 130 nt, synthetic construct
  misc_feature 1..130: note = Description of Artificial Sequence: Synthetic polynucleotide
  source 1..130: mol_type = other RNA
tttggtgactgccacgcccagttttagagctagaaatagcaagttaaaataaggctagtccgttatcaacttgaaaaagtggcaccgagtcggtgcgccagcagtgaacatccgttgggcgtggcagtca

SEQ ID NO: 3169 - RNA, 130 nt, synthetic construct
  misc_feature 1..130: note = Description of Artificial Sequence: Synthetic polynucleotide
  source 1..130: mol_type = other RNA
tttggtgactgccacgcccagttttagagctagaaatagcaagttaaaataaggctagtccgttatcaacttgaaaaagtggcaccgagtcggtgcaggccagcagtgaacacccgttgggcgtggcagt

SEQ ID NO: 3170 - RNA, 130 nt, synthetic construct
  misc_feature 1..130: note = Description of Artificial Sequence: Synthetic polynucleotide
  source 1..130: mol_type = other RNA
tttggtgactgccacgcccagttttagagctagaaatagcaagttaaaataaggctagtccgttatcaacttgaaaaagtggcaccgagtcggtgcggaggccagcagtgaacaccccttgggcgtggca

SEQ ID NO: 3171 - RNA, 130 nt, synthetic construct
  misc_feature 1..130: note = Description of Artificial Sequence: Synthetic polynucleotide
  source 1..130: mol_type = other RNA
gtttggtgactgccacgcccagttttagagctagaaatagcaagttaaaataaggctagtccgttatcaacttgaaaaagtggcaccgagtcggtgcgaacaccctttgggcgtggcagtcacctttttt

SEQ ID NO: 3172 - RNA, 130 nt, synthetic construct
  misc_feature 1..130: note = Description of Artificial Sequence: Synthetic polynucleotide
  source 1..130: mol_type = other RNA
gtttggtgactgccacgcccagttttagagctagaaatagcaagttaaaataaggctagtccgttatcaacttgaaaaagtggcaccgagtcggtgctgaacacccattgggcgtggcagtcattttttt

SEQ ID NO: 3173 - RNA, 130 nt, synthetic construct
  misc_feature 1..130: note = Description of Artificial Sequence: Synthetic polynucleotide
  source 1..130: mol_type = other RNA
gtttggtgactgccacgcccagttttagagctagaaatagcaagttaaaataaggctagtccgttatcaacttgaaaaagtggcaccgagtcggtgcaacaccctttgggcgtggcagtcaccttttttt

SEQ ID NO: 3174 - RNA, 130 nt, synthetic construct
  misc_feature 1..130: note = Description of Artificial Sequence: Synthetic polynucleotide
  source 1..130: mol_type = other RNA
tttggtgactgccacgcccagttttagagctagaaatagcaagttaaaataaggctagtccgttatcaacttgaaaaagtggcaccgagtcggtgcagtgaacatcccttgggcgtggcagtcacctttt

SEQ ID NO: 3175 - RNA, 130 nt, synthetic construct
  misc_feature 1..130: note = Description of Artificial Sequence: Synthetic polynucleotide
  source 1..130: mol_type = other RNA
gtttggtgactgccacgcccagttttagagctagaaatagcaagttaaaataaggctagtccgttatcaacttgaaaaagtggcaccgagtcggtgcgtgaacacccgttgggcgtggcagtcatttttt

SEQ ID NO: 3176 - RNA, 130 nt, synthetic construct
  misc_feature 1..130: note = Description of Artificial Sequence: Synthetic polynucleotide
  source 1..130: mol_type = other RNA
tttggtgactgccacgcccagttttagagctagaaatagcaagttaaaataaggctagtccgttatcaacttgaaaaagtggcaccgagtcggtgcgaggccagcagtgaacacccattgggcgtggcag

SEQ ID NO: 3177 - RNA, 130 nt, synthetic construct
  misc_feature 1..130: note = Description of Artificial Sequence: Synthetic polynucleotide
  source 1..130: mol_type = other RNA
gtttggtgactgccacgcccagttttagagctagaaatagcaagttaaaataaggctagtccgttatcaacttgaaaaagtggcaccgagtcggtgcacaccccttgggcgtggcagtcaccaatttttt

SEQ ID NO: 3178 - RNA, 130 nt, synthetic construct
  misc_feature 1..130: note = Description of Artificial Sequence: Synthetic polynucleotide
  source 1..130: mol_type = other RNA
gtttggtgactgccacgcccagttttagagctagaaatagcaagttaaaataaggctagtccgttatcaacttgaaaaagtggcaccgagtcggtgcagtgaacaccctttgggcgtggcagtttttttt

SEQ ID NO: 3179 - RNA, 130 nt, synthetic construct
  misc_feature 1..130: note = Description of Artificial Sequence: Synthetic polynucleotide
  source 1..130: mol_type = other RNA
gtttggtgactgccacgcccagttttagagctagaaatagcaagttaaaataaggctagtccgttatcaacttgaaaaagtggcaccgagtcggtgcacaccctttgggcgtggcagtcaccaatttttt

SEQ ID NO: 3180 - RNA, 130 nt, synthetic construct
  misc_feature 1..130: note = Description of Artificial Sequence: Synthetic polynucleotide
  source 1..130: mol_type = other RNA
gtttggtgactgccacgcccagttttagagctagaaatagcaagttaaaataaggctagtccgttatcaacttgaaaaagtggcaccgagtcggtgcgtgaacacccattgggcgtggcagtcatttttt

SEQ ID NO: 3181 - RNA, 130 nt, synthetic construct
  misc_feature 1..130: note = Description of Artificial Sequence: Synthetic polynucleotide
  source 1..130: mol_type = other RNA
gtttggtgactgccacgcccagttttagagctagaaatagcaagttaaaataaggctagtccgttatcaacttgaaaaagtggcaccgagtcggtgcacacccgttgggcgtggcagtcaccaatttttt

SEQ ID NO: 3182 - RNA, 130 nt, synthetic construct
  misc_feature 1..130: note = Description of Artificial Sequence: Synthetic polynucleotide
  source 1..130: mol_type = other RNA
tttggtgactgccacgcccagttttagagctagaaatagcaagttaaaataaggctagtccgttatcaacttgaaaaagtggcaccgagtcggtgcgcagtgaacatcccttgggcgtggcagtcaccaa

SEQ ID NO: 3183 - RNA, 130 nt, synthetic construct
  misc_feature 1..130: note = Description of Artificial Sequence: Synthetic polynucleotide
  source 1..130: mol_type = other RNA
gtttggtgactgccacgcccagttttagagctagaaatagcaagttaaaataaggctagtccgttatcaacttgaaaaagtggcaccgagtcggtgcgcagtgaacacccgttgggcgtggcattttttt

SEQ ID NO: 3184 - RNA, 130 nt, synthetic construct
  misc_feature 1..130: note = Description of Artificial Sequence: Synthetic polynucleotide
  source 1..130: mol_type = other RNA
tttggtgactgccacgcccagttttagagctagaaatagcaagttaaaataaggctagtccgttatcaacttgaaaaagtggcaccgagtcggtgcgcagtgaacatcccttgggcgtggcagtcatttt

SEQ ID NO: 3185 - RNA, 130 nt, synthetic construct
  misc_feature 1..130: note = Description of Artificial Sequence: Synthetic polynucleotide
  source 1..130: mol_type = other RNA
gtttggtgactgccacgcccagttttagagctagaaatagcaagttaaaataaggctagtccgttatcaacttgaaaaagtggcaccgagtcggtgcgaacacccattgggcgtggcagtcacttttttt

SEQ ID NO: 3186 - RNA, 130 nt, synthetic construct
  misc_feature 1..130: note = Description of Artificial Sequence: Synthetic polynucleotide
  source 1..130: mol_type = other RNA
gtttggtgactgccacgcccagttttagagctagaaatagcaagttaaaataaggctagtccgttatcaacttgaaaaagtggcaccgagtcggtgcagtgaacaccccttgggcgtggcagtttttttt

SEQ ID NO: 3187 - RNA, 130 nt, synthetic construct
  misc_feature 1..130: note = Description of Artificial Sequence: Synthetic polynucleotide
  source 1..130: mol_type = other RNA
gtttggtgactgccacgcccagttttagagctagaaatagcaagttaaaataaggctagtccgttatcaacttgaaaaagtggcaccgagtcggtgcgcagtgaacaccccttgggcgtggcattttttt

SEQ ID NO: 3188 - RNA, 130 nt, synthetic construct
  misc_feature 1..130: note = Description of Artificial Sequence: Synthetic polynucleotide
  source 1..130: mol_type = other RNA
tttggtgactgccacgcccagttttagagctagaaatagcaagttaaaataaggctagtccgttatcaacttgaaaaagtggcaccgagtcggtgcgccagcagtgaacacccgttgggcgtggcagtca

SEQ ID NO: 3189 - RNA, 130 nt, synthetic construct
  misc_feature 1..130: note = Description of Artificial Sequence: Synthetic polynucleotide
  source 1..130: mol_type = other RNA
gtttggtgactgccacgcccagttttagagctagaaatagcaagttaaaataaggctagtccgttatcaacttgaaaaagtggcaccgagtcggtgcgaacaccctttgggcgtggcagtcacttttttt

SEQ ID NO: 3190 - RNA, 130 nt, synthetic construct
  misc_feature 1..130: note = Description of Artificial Sequence: Synthetic polynucleotide
  source 1..130: mol_type = other RNA
tttggtgactgccacgcccagttttagagctagaaatagcaagttaaaataaggctagtccgttatcaacttgaaaaagtggcaccgagtcggtgcgcagtgaacatccgttgggcgtggcagtcaccaa

SEQ ID NO: 3191 - RNA, 130 nt, synthetic construct
  misc_feature 1..130: note = Description of Artificial Sequence: Synthetic polynucleotide
  source 1..130: mol_type = other RNA
tttggtgactgccacgcccagttttagagctagaaatagcaagttaaaataaggctagtccgttatcaacttgaaaaagtggcaccgagtcggtgcgaggccagcagtgaacaccccttgggcgtggcag

SEQ ID NO: 3192 - RNA, 130 nt, synthetic construct
  misc_feature 1..130: note = Description of Artificial Sequence: Synthetic polynucleotide
  source 1..130: mol_type = other RNA
gtttggtgactgccacgcccagttttagagctagaaatagcaagttaaaataaggctagtccgttatcaacttgaaaaagtggcaccgagtcggtgcgcagtgaacacccattgggcgtggcattttttt

SEQ ID NO: 3193 - RNA, 130 nt, synthetic construct
  misc_feature 1..130: note = Description of Artificial Sequence: Synthetic polynucleotide
  source 1..130: mol_type = other RNA
gtttggtgactgccacgcccagttttagagctagaaatagcaagttaaaataaggctagtccgttatcaacttgaaaaagtggcaccgagtcggtgcgtgaacacccattgggcgtggcagtcttttttt

SEQ ID NO: 3194 - RNA, 130 nt, synthetic construct
  misc_feature 1..130: note = Description of Artificial Sequence: Synthetic polynucleotide
  source 1..130: mol_type = other RNA
tttggtgactgccacgcccagttttagagctagaaatagcaagttaaaataaggctagtccgttatcaacttgaaaaagtggcaccgagtcggtgcgccagcagtgaacatccgttgggcgtggcatttt

SEQ ID NO: 3195 - RNA, 130 nt, synthetic construct
  misc_feature 1..130: note = Description of Artificial Sequence: Synthetic polynucleotide
  source 1..130: mol_type = other RNA
tttggtgactgccacgcccagttttagagctagaaatagcaagttaaaataaggctagtccgttatcaacttgaaaaagtggcaccgagtcggtgcggaggccagcagtgaacacccgttgggcgtggca

SEQ ID NO: 3196 - RNA, 131 nt, synthetic construct
  misc_feature 1..131: note = Description of Artificial Sequence: Synthetic polynucleotide
  source 1..131: mol_type = other RNA
gtttggtgactgccacgcccagttttagagctagaaatagcaagttaaaataaggctagtccgttatcaacttgaaaaagtggcaccgagtcggtgcgtgaacaccctttgggcgtggcagtcattttttt

SEQ ID NO: 3197 - RNA, 131 nt, synthetic construct
  misc_feature 1..131: note = Description of Artificial Sequence: Synthetic polynucleotide
  source 1..131: mol_type = other RNA
gtttggtgactgccacgcccagttttagagctagaaatagcaagttaaaataaggctagtccgttatcaacttgaaaaagtggcaccgagtcggtgcagtgaacaccccttgggcgtggcagtcttttttt

SEQ ID NO: 3198 - RNA, 131 nt, synthetic construct
  misc_feature 1..131: note = Description of Artificial Sequence: Synthetic polynucleotide
  source 1..131: mol_type = other RNA
gtttggtgactgccacgcccagttttagagctagaaatagcaagttaaaataaggctagtccgttatcaacttgaaaaagtggcaccgagtcggtgcagtgaacaccccttgggcgtggcagtcatttttt

SEQ ID NO: 3199 - RNA, 131 nt, synthetic construct
  misc_feature 1..131: note = Description of Artificial Sequence: Synthetic polynucleotide
  source 1..131: mol_type = other RNA
tttggtgactgccacgcccagttttagagctagaaatagcaagttaaaataaggctagtccgttatcaacttgaaaaagtggcaccgagtcggtgcagcagtgaacatcccttgggcgtggcagtcatttt

SEQ ID NO: 3200 - RNA, 131 nt, synthetic construct
  misc_feature 1..131: note = Description of Artificial Sequence: Synthetic polynucleotide
  source 1..131: mol_type = other RNA
tttggtgactgccacgcccagttttagagctagaaatagcaagttaaaataaggctagtccgttatcaacttgaaaaagtggcaccgagtcggtgcagcagtgaacaccctttgggcgtggcagtcaccaa

SEQ ID NO: 3201 - RNA, 131 nt, synthetic construct
  misc_feature 1..131: note = Description of Artificial Sequence: Synthetic polynucleotide
  source 1..131: mol_type = other RNA
gtttggtgactgccacgcccagttttagagctagaaatagcaagttaaaataaggctagtccgttatcaacttgaaaaagtggcaccgagtcggtgcaacaccctttgggcgtggcagtcaccaatttttt

SEQ ID NO: 3202 - RNA, 131 nt, synthetic construct
  misc_feature 1..131: note = Description of Artificial Sequence: Synthetic polynucleotide
  source 1..131: mol_type = other RNA
tttggtgactgccacgcccagttttagagctagaaatagcaagttaaaataaggctagtccgttatcaacttgaaaaagtggcaccgagtcggtgcgaggccagcagtgaacacccattgggcgtggcagt

SEQ ID NO: 3203 - RNA, 131 nt, synthetic construct
  misc_feature 1..131: note = Description of Artificial Sequence: Synthetic polynucleotide
  source 1..131: mol_type = other RNA
tttggtgactgccacgcccagttttagagctagaaatagcaagttaaaataaggctagtccgttatcaacttgaaaaagtggcaccgagtcggtgcagcagtgaacatcccttgggcgtggcagtcaccaa

SEQ ID NO: 3204 - RNA, 131 nt, synthetic construct
  misc_feature 1..131: note = Description of Artificial Sequence: Synthetic polynucleotide
  source 1..131: mol_type = other RNA
gtttggtgactgccacgcccagttttagagctagaaatagcaagttaaaataaggctagtccgttatcaacttgaaaaagtggcaccgagtcggtgcagcagtgaacacccattgggcgtggcattttttt

SEQ ID NO: 3205 - RNA, 131 nt, synthetic construct
  misc_feature 1..131: note = Description of Artificial Sequence: Synthetic polynucleotide
  source 1..131: mol_type = other RNA
gtttggtgactgccacgcccagttttagagctagaaatagcaagttaaaataaggctagtccgttatcaacttgaaaaagtggcaccgagtcggtgcgaacacccattgggcgtggcagtcaccttttttt

SEQ ID NO: 3206 - RNA, 131 nt, synthetic construct
  misc_feature 1..131: note = Description of Artificial Sequence: Synthetic polynucleotide
  source 1..131: mol_type = other RNA
gtttggtgactgccacgcccagttttagagctagaaatagcaagttaaaataaggctagtccgttatcaacttgaaaaagtggcaccgagtcggtgctgaacaccctttgggcgtggcagtcacttttttt

SEQ ID NO: 3207 - RNA, 131 nt, synthetic construct
  misc_feature 1..131: note = Description of Artificial Sequence: Synthetic polynucleotide
  source 1..131: mol_type = other RNA
gtttggtgactgccacgcccagttttagagctagaaatagcaagttaaaataaggctagtccgttatcaacttgaaaaagtggcaccgagtcggtgctgaacacccgttgggcgtggcagtcacttttttt

SEQ ID NO: 3208 - RNA, 131 nt, synthetic construct
  misc_feature 1..131: note = Description of Artificial Sequence: Synthetic polynucleotide
  source 1..131: mol_type = other RNA
gtttggtgactgccacgcccagttttagagctagaaatagcaagttaaaataaggctagtccgttatcaacttgaaaaagtggcaccgagtcggtgctgaacaccccttgggcgtggcagtcacctttttt

SEQ ID NO: 3209 - RNA, 131 nt, synthetic construct
  misc_feature 1..131: note = Description of Artificial Sequence: Synthetic polynucleotide
  source 1..131: mol_type = other RNA
gtttggtgactgccacgcccagttttagagctagaaatagcaagttaaaataaggctagtccgttatcaacttgaaaaagtggcaccgagtcggtgctgaacaccccttgggcgtggcagtcacttttttt

SEQ ID NO: 3210 - RNA, 131 nt, synthetic construct
  misc_feature 1..131: note = Description of Artificial Sequence: Synthetic polynucleotide
  source 1..131: mol_type = other RNA
tttggtgactgccacgcccagttttagagctagaaatagcaagttaaaataaggctagtccgttatcaacttgaaaaagtggcaccgagtcggtgcagcagtgaacacccattgggcgtggcagtcaccaa

SEQ ID NO: 3211 - RNA, 131 nt, synthetic construct
  misc_feature 1..131: note = Description of Artificial Sequence: Synthetic polynucleotide
  source 1..131: mol_type = other RNA
gtttggtgactgccacgcccagttttagagctagaaatagcaagttaaaataaggctagtccgttatcaacttgaaaaagtggcaccgagtcggtgcgtgaacacccattgggcgtggcagtcattttttt

SEQ ID NO: 3212 - RNA, 131 nt, synthetic construct
  misc_feature 1..131: note = Description of Artificial Sequence: Synthetic polynucleotide
  source 1..131: mol_type = other RNA
tttggtgactgccacgcccagttttagagctagaaatagcaagttaaaataaggctagtccgttatcaacttgaaaaagtggcaccgagtcggtgcgaggccagcagtgaacaccccttgggcgtggcagt

SEQ ID NO: 3213 - RNA, 131 nt, synthetic construct
  misc_feature 1..131: note = Description of Artificial Sequence: Synthetic polynucleotide
  source 1..131: mol_type = other RNA
gtttggtgactgccacgcccagttttagagctagaaatagcaagttaaaataaggctagtccgttatcaacttgaaaaagtggcaccgagtcggtgctgaacacccattgggcgtggcagtcacttttttt

SEQ ID NO: 3214 - RNA, 131 nt, synthetic construct
  misc_feature 1..131: note = Description of Artificial Sequence: Synthetic polynucleotide
  source 1..131: mol_type = other RNA
gtttggtgactgccacgcccagttttagagctagaaatagcaagttaaaataaggctagtccgttatcaacttgaaaaagtggcaccgagtcggtgcgtgaacacccgttgggcgtggcagtcattttttt

SEQ ID NO: 3215 - RNA, 131 nt, synthetic construct
  misc_feature 1..131: note = Description of Artificial Sequence: Synthetic polynucleotide
  source 1..131: mol_type = other RNA
gtttggtgactgccacgcccagttttagagctagaaatagcaagttaaaataaggctagtccgttatcaacttgaaaaagtggcaccgagtcggtgcgtgaacaccccttgggcgtggcagtcattttttt

SEQ ID NO: 3216 - RNA, 131 nt, synthetic construct
  misc_feature 1..131: note = Description of Artificial Sequence: Synthetic polynucleotide
  source 1..131: mol_type = other RNA
tttggtgactgccacgcccagttttagagctagaaatagcaagttaaaataaggctagtccgttatcaacttgaaaaagtggcaccgagtcggtgcgcggaggccagcagtgaacaccctttgggcgtggc

SEQ ID NO: 3217 - RNA, 131 nt, synthetic construct
  misc_feature 1..131: note = Description of Artificial Sequence: Synthetic polynucleotide
  source 1..131: mol_type = other RNA
gtttggtgactgccacgcccagttttagagctagaaatagcaagttaaaataaggctagtccgttatcaacttgaaaaagtggcaccgagtcggtgctgaacacccgttgggcgtggcagtcacctttttt

SEQ ID NO: 3218 - RNA, 131 nt, synthetic construct
  misc_feature 1..131: note = Description of Artificial Sequence: Synthetic polynucleotide
  source 1..131: mol_type = other RNA
tttggtgactgccacgcccagttttagagctagaaatagcaagttaaaataaggctagtccgttatcaacttgaaaaagtggcaccgagtcggtgcggccagcagtgaacaccctttgggcgtggcagtca

SEQ ID NO: 3219 - RNA, 131 nt, synthetic construct
  misc_feature 1..131: note = Description of Artificial Sequence: Synthetic polynucleotide
  source 1..131: mol_type = other RNA
gtttggtgactgccacgcccagttttagagctagaaatagcaagttaaaataaggctagtccgttatcaacttgaaaaagtggcaccgagtcggtgcaacaccccttgggcgtggcagtcaccaatttttt

SEQ ID NO: 3220 - RNA, 131 nt, synthetic construct
  misc_feature 1..131: note = Description of Artificial Sequence: Synthetic polynucleotide
  source 1..131: mol_type = other RNA
gtttggtgactgccacgcccagttttagagctagaaatagcaagttaaaataaggctagtccgttatcaacttgaaaaagtggcaccgagtcggtgcgcagtgaacaccctttgggcgtggcagttttttt

SEQ ID NO: 3221 - RNA, 131 nt, synthetic construct
  misc_feature 1..131: note = Description of Artificial Sequence: Synthetic polynucleotide
  source 1..131: mol_type = other RNA
gtttggtgactgccacgcccagttttagagctagaaatagcaagttaaaataaggctagtccgttatcaacttgaaaaagtggcaccgagtcggtgcgcagtgaacacccgttgggcgtggcagttttttt

SEQ ID NO: 3222 - RNA, 131 nt, synthetic construct
  misc_feature 1..131: note = Description of Artificial Sequence: Synthetic polynucleotide
  source 1..131: mol_type = other RNA
gtttggtgactgccacgcccagttttagagctagaaatagcaagttaaaataaggctagtccgttatcaacttgaaaaagtggcaccgagtcggtgcaacacccgttgggcgtggcagtcaccaatttttt

SEQ ID NO: 3223 - RNA, 131 nt, synthetic construct
  misc_feature 1..131: note = Description of Artificial Sequence: Synthetic polynucleotide
  source 1..131: mol_type = other RNA
gtttggtgactgccacgcccagttttagagctagaaatagcaagttaaaataaggctagtccgttatcaacttgaaaaagtggcaccgagtcggtgcagtgaacacccgttgggcgtggcagtcatttttt

SEQ ID NO: 3224 - RNA, 131 nt, synthetic construct
  misc_feature 1..131: note = Description of Artificial Sequence: Synthetic polynucleotide
  source 1..131: mol_type = other RNA
gtttggtgactgccacgcccagttttagagctagaaatagcaagttaaaataaggctagtccgttatcaacttgaaaaagtggcaccgagtcggtgcagtgaacacccgttgggcgtggcagtcttttttt

SEQ ID NO: 3225 - RNA, 131 nt, synthetic construct
  misc_feature 1..131: note = Description of Artificial Sequence: Synthetic polynucleotide
  source 1..131: mol_type = other RNA
tttggtgactgccacgcccagttttagagctagaaatagcaagttaaaataaggctagtccgttatcaacttgaaaaagtggcaccgagtcggtgcagcagtgaacatccgttgggcgtggcagtcatttt

SEQ ID NO: 3226 - RNA, 131 nt, synthetic construct
  misc_feature 1..131: note = Description of Artificial Sequence: Synthetic polynucleotide
  source 1..131: mol_type = other RNA
tttggtgactgccacgcccagttttagagctagaaatagcaagttaaaataaggctagtccgttatcaacttgaaaaagtggcaccgagtcggtgcgcggaggccagcagtgaacacccgttgggcgtggc

SEQ ID NO: 3227 - RNA, 131 nt, synthetic construct
  misc_feature 1..131: note = Description of Artificial Sequence: Synthetic polynucleotide
  source 1..131: mol_type = other RNA
tttggtgactgccacgcccagttttagagctagaaatagcaagttaaaataaggctagtccgttatcaacttgaaaaagtggcaccgagtcggtgcgccagcagtgaacaccctttgggcgtggcagtcac

SEQ ID NO: 3228 - RNA, 131 nt, synthetic construct
  misc_feature 1..131: note = Description of Artificial Sequence: Synthetic polynucleotide
  source 1..131: mol_type = other RNA
tttggtgactgccacgcccagttttagagctagaaatagcaagttaaaataaggctagtccgttatcaacttgaaaaagtggcaccgagtcggtgcgccagcagtgaacaccccttgggcgtggcagtcac

SEQ ID NO: 3229 - RNA, 131 nt, synthetic construct
  misc_feature 1..131: note = Description of Artificial Sequence: Synthetic polynucleotide
  source 1..131: mol_type = other RNA
tttggtgactgccacgcccagttttagagctagaaatagcaagttaaaataaggctagtccgttatcaacttgaaaaagtggcaccgagtcggtgcggccagcagtgaacacccgttgggcgtggcagtca

SEQ ID NO: 3230 - RNA, 131 nt, synthetic construct
  misc_feature 1..131: note = Description of Artificial Sequence: Synthetic polynucleotide
  source 1..131: mol_type = other RNA
tttggtgactgccacgcccagttttagagctagaaatagcaagttaaaataaggctagtccgttatcaacttgaaaaagtggcaccgagtcggtgcggccagcagtgaacaccccttgggcgtggcagtca

SEQ ID NO: 3231 - RNA, 131 nt, synthetic construct
  misc_feature 1..131: note = Description of Artificial Sequence: Synthetic polynucleotide
  source 1..131: mol_type = other RNA
tttggtgactgccacgcccagttttagagctagaaatagcaagttaaaataaggctagtccgttatcaacttgaaaaagtggcaccgagtcggtgcgccagcagtgaacacccattgggcgtggcagtcac

SEQ ID NO: 3232 - RNA, 131 nt, synthetic construct
  misc_feature 1..131: note = Description of Artificial Sequence: Synthetic polynucleotide
  source 1..131: mol_type = other RNA
tttggtgactgccacgcccagttttagagctagaaatagcaagttaaaataaggctagtccgttatcaacttgaaaaagtggcaccgagtcggtgcgcggaggccagcagtgaacaccccttgggcgtggc

SEQ ID NO: 3233 - RNA, 131 nt, synthetic construct
  misc_feature 1..131: note = Description of Artificial Sequence: Synthetic polynucleotide
  source 1..131: mol_type = other RNA
gtttggtgactgccacgcccagttttagagctagaaatagcaagttaaaataaggctagtccgttatcaacttgaaaaagtggcaccgagtcggtgcagcagtgaacacccgttgggcgtggcattttttt

SEQ ID NO: 3234 - RNA, 131 nt, synthetic construct
  misc_feature 1..131: note = Description of Artificial Sequence: Synthetic polynucleotide
  source 1..131: mol_type = other RNA
tttggtgactgccacgcccagttttagagctagaaatagcaagttaaaataaggctagtccgttatcaacttgaaaaagtggcaccgagtcggtgcggaggccagcagtgaacacccgttgggcgtggcag

SEQ ID NO: 3235 - RNA, 131 nt, synthetic construct
  misc_feature 1..131: note = Description of Artificial Sequence: Synthetic polynucleotide
  source 1..131: mol_type = other RNA
tttggtgactgccacgcccagttttagagctagaaatagcaagttaaaataaggctagtccgttatcaacttgaaaaagtggcaccgagtcggtgcggaggccagcagtgaacaccctttgggcgtggcag

SEQ ID NO: 3236 - RNA, 131 nt, synthetic construct
  misc_feature 1..131: note = Description of Artificial Sequence: Synthetic polynucleotide
  source 1..131: mol_type = other RNA
gtttggtgactgccacgcccagttttagagctagaaatagcaagttaaaataaggctagtccgttatcaacttgaaaaagtggcaccgagtcggtgcgcagtgaacaccccttgggcgtggcagttttttt

SEQ ID NO: 3237 - RNA, 131 nt, synthetic construct
  misc_feature 1..131: note = Description of Artificial Sequence: Synthetic polynucleotide
  source 1..131: mol_type = other RNA
gtttggtgactgccacgcccagttttagagctagaaatagcaagttaaaataaggctagtccgttatcaacttgaaaaagtggcaccgagtcggtgcagtgaacacccattgggcgtggcagtcatttttt

SEQ ID NO: 3238 - RNA, 131 nt, synthetic construct
  misc_feature 1..131: note = Description of Artificial Sequence: Synthetic polynucleotide
  source 1..131: mol_type = other RNA
tttggtgactgccacgcccagttttagagctagaaatagcaagttaaaataaggctagtccgttatcaacttgaaaaagtggcaccgagtcggtgcaggccagcagtgaacaccccttgggcgtggcagtc

SEQ ID NO: 3239 - RNA, 131 nt, synthetic construct
  misc_feature 1..131: note = Description of Artificial Sequence: Synthetic polynucleotide
  source 1..131: mol_type = other RNA
tttggtgactgccacgcccagttttagagctagaaatagcaagttaaaataaggctagtccgttatcaacttgaaaaagtggcaccgagtcggtgcgcggaggccagcagtgaacacccattgggcgtggc

SEQ ID NO: 3240 - RNA, 131 nt, synthetic construct
  misc_feature 1..131: note = Description of Artificial Sequence: Synthetic polynucleotide
  source 1..131: mol_type = other RNA
gtttggtgactgccacgcccagttttagagctagaaatagcaagttaaaataaggctagtccgttatcaacttgaaaaagtggcaccgagtcggtgcagcagtgaacaccccttgggcgtggcattttttt

SEQ ID NO: 3241 - RNA, 131 nt, synthetic construct
  misc_feature 1..131: note = Description of Artificial Sequence: Synthetic polynucleotide
  source 1..131: mol_type = other RNA
tttggtgactgccacgcccagttttagagctagaaatagcaagttaaaataaggctagtccgttatcaacttgaaaaagtggcaccgagtcggtgcaggccagcagtgaacacccgttgggcgtggcagtc

SEQ ID NO: 3242 - RNA, 131 nt, synthetic construct
  misc_feature 1..131: note = Description of Artificial Sequence: Synthetic polynucleotide
  source 1..131: mol_type = other RNA
gtttggtgactgccacgcccagttttagagctagaaatagcaagttaaaataaggctagtccgttatcaacttgaaaaagtggcaccgagtcggtgcagtgaacacccattgggcgtggcagtcttttttt

SEQ ID NO: 3243 - RNA, 131 nt, synthetic construct
  misc_feature 1..131: note = Description of Artificial Sequence: Synthetic polynucleotide
  source 1..131: mol_type = other RNA
tttggtgactgccacgcccagttttagagctagaaatagcaagttaaaataaggctagtccgttatcaacttgaaaaagtggcaccgagtcggtgcaggccagcagtgaacacccattgggcgtggcagtc

SEQ ID NO: 3244 - RNA, 131 nt, synthetic construct
  misc_feature 1..131: note = Description of Artificial Sequence: Synthetic polynucleotide
  source 1..131: mol_type = other RNA
tttggtgactgccacgcccagttttagagctagaaatagcaagttaaaataaggctagtccgttatcaacttgaaaaagtggcaccgagtcggtgcaggccagcagtgaacaccctttgggcgtggcagtc

SEQ ID NO: 3245 - RNA, 131 nt, synthetic construct
  misc_feature 1..131: note = Description of Artificial Sequence: Synthetic polynucleotide
  source 1..131: mol_type = other RNA
tttggtgactgccacgcccagttttagagctagaaatagcaagttaaaataaggctagtccgttatcaacttgaaaaagtggcaccgagtcggtgcggaggccagcagtgaacacccattgggcgtggcag

SEQ ID NO: 3246 - RNA, 131 nt, synthetic construct
  misc_feature 1..131: note = Description of Artificial Sequence: Synthetic polynucleotide
  source 1..131: mol_type = other RNA
tttggtgactgccacgcccagttttagagctagaaatagcaagttaaaataaggctagtccgttatcaacttgaaaaagtggcaccgagtcggtgcggaggccagcagtgaacaccccttgggcgtggcag

SEQ ID NO: 3247 - RNA, 131 nt, synthetic construct
  misc_feature 1..131: note = Description of Artificial Sequence: Synthetic polynucleotide
  source 1..131: mol_type = other RNA
tttggtgactgccacgcccagttttagagctagaaatagcaagttaaaataaggctagtccgttatcaacttgaaaaagtggcaccgagtcggtgcgaggccagcagtgaacaccctttgggcgtggcagt

SEQ ID NO: 3248 - RNA, 131 nt, synthetic construct
  misc_feature 1..131: note = Description of Artificial Sequence: Synthetic polynucleotide
  source 1..131: mol_type = other RNA
tttggtgactgccacgcccagttttagagctagaaatagcaagttaaaataaggctagtccgttatcaacttgaaaaagtggcaccgagtcggtgcagcagtgaacacccgttgggcgtggcagtcaccaa

SEQ ID NO: 3249 - RNA, 131 nt, synthetic construct
  misc_feature 1..131: note = Description of Artificial Sequence: Synthetic polynucleotide
  source 1..131: mol_type = other RNA
tttggtgactgccacgcccagttttagagctagaaatagcaagttaaaataaggctagtccgttatcaacttgaaaaagtggcaccgagtcggtgcgaggccagcagtgaacacccgttgggcgtggcagt

SEQ ID NO: 3250 - RNA, 131 nt, synthetic construct
  misc_feature 1..131: note = Description of Artificial Sequence: Synthetic polynucleotide
  source 1..131: mol_type = other RNA
tttggtgactgccacgcccagttttagagctagaaatagcaagttaaaataaggctagtccgttatcaacttgaaaaagtggcaccgagtcggtgcagcagtgaacatccgttgggcgtggcagtcaccaa

SEQ ID NO: 3251 - RNA, 131 nt, synthetic construct
  misc_feature 1..131: note = Description of Artificial Sequence: Synthetic polynucleotide
  source 1..131: mol_type = other RNA
gtttggtgactgccacgcccagttttagagctagaaatagcaagttaaaataaggctagtccgttatcaacttgaaaaagtggcaccgagtcggtgcagtgaacaccctttgggcgtggcagtcatttttt

SEQ ID NO: 3252 - RNA, 131 nt, synthetic construct
  misc_feature 1..131: note = Description of Artificial Sequence: Synthetic polynucleotide
  source 1..131: mol_type = other RNA
gtttggtgactgccacgcccagttttagagctagaaatagcaagttaaaataaggctagtccgttatcaacttgaaaaagtggcaccgagtcggtgctgaacaccctttgggcgtggcagtcacctttttt

SEQ ID NO: 3253 - RNA, 131 nt, synthetic construct
  misc_feature 1..131: note = Description of Artificial Sequence: Synthetic polynucleotide
  source 1..131: mol_type = other RNA
gtttggtgactgccacgcccagttttagagctagaaatagcaagttaaaataaggctagtccgttatcaacttgaaaaagtggcaccgagtcggtgcagcagtgaacaccctttgggcgtggcattttttt

SEQ ID NO: 3254 - RNA, 131 nt, synthetic construct
  misc_feature 1..131: note = Description of Artificial Sequence: Synthetic polynucleotide
  source 1..131: mol_type = other RNA
gtttggtgactgccacgcccagttttagagctagaaatagcaagttaaaataaggctagtccgttatcaacttgaaaaagtggcaccgagtcggtgcgaacaccctttgggcgtggcagtcaccttttttt

SEQ ID NO: 3255 - RNA, 131 nt, synthetic construct
  misc_feature 1..131: note = Description of Artificial Sequence: Synthetic polynucleotide
  source 1..131: mol_type = other RNA
gtttggtgactgccacgcccagttttagagctagaaatagcaagttaaaataaggctagtccgttatcaacttgaaaaagtggcaccgagtcggtgcagtgaacaccctttgggcgtggcagtcttttttt

SEQ ID NO: 3256 - RNA, 131 nt, synthetic construct
  misc_feature 1..131: note = Description of Artificial Sequence: Synthetic polynucleotide
  source 1..131: mol_type = other RNA
gtttggtgactgccacgcccagttttagagctagaaatagcaagttaaaataaggctagtccgttatcaacttgaaaaagtggcaccgagtcggtgctgaacacccattgggcgtggcagtcacctttttt

SEQ ID NO: 3257 - RNA, 131 nt, synthetic construct
  misc_feature 1..131: note = Description of Artificial Sequence: Synthetic polynucleotide
  source 1..131: mol_type = other RNA
gtttggtgactgccacgcccagttttagagctagaaatagcaagttaaaataaggctagtccgttatcaacttgaaaaagtggcaccgagtcggtgcgaacaccccttgggcgtggcagtcaccttttttt

SEQ ID NO: 3258 - RNA, 131 nt, synthetic construct
  misc_feature 1..131: note = Description of Artificial Sequence: Synthetic polynucleotide
  source 1..131: mol_type = other RNA
gtttggtgactgccacgcccagttttagagctagaaatagcaagttaaaataaggctagtccgttatcaacttgaaaaagtggcaccgagtcggtgcgaacacccgttgggcgtggcagtcaccttttttt

SEQ ID NO: 3259 - RNA, 131 nt, synthetic construct
  misc_feature 1..131: note = Description of Artificial Sequence: Synthetic polynucleotide
  source 1..131: mol_type = other RNA
tttggtgactgccacgcccagttttagagctagaaatagcaagttaaaataaggctagtccgttatcaacttgaaaaagtggcaccgagtcggtgcgtgaacatcccttgggcgtggcagtcaccaatttt

SEQ ID NO: 3260 - RNA, 131 nt, synthetic construct
  misc_feature 1..131: note = Description of Artificial Sequence: Synthetic polynucleotide
  source 1..131: mol_type = other RNA
tttggtgactgccacgcccagttttagagctagaaatagcaagttaaaataaggctagtccgttatcaacttgaaaaagtggcaccgagtcggtgcggccagcagtgaacacccattgggcgtggcagtca

SEQ ID NO: 3261 - RNA, 131 nt, synthetic construct
  misc_feature 1..131: note = Description of Artificial Sequence: Synthetic polynucleotide
  source 1..131: mol_type = other RNA
gtttggtgactgccacgcccagttttagagctagaaatagcaagttaaaataaggctagtccgttatcaacttgaaaaagtggcaccgagtcggtgcaacacccattgggcgtggcagtcaccaatttttt

SEQ ID NO: 3262 - RNA, 131 nt, synthetic construct
  misc_feature 1..131: note = Description of Artificial Sequence: Synthetic polynucleotide
  source 1..131: mol_type = other RNA
tttggtgactgccacgcccagttttagagctagaaatagcaagttaaaataaggctagtccgttatcaacttgaaaaagtggcaccgagtcggtgcgccagcagtgaacacccgttgggcgtggcagtcac

SEQ ID NO: 3263 - RNA, 131 nt, synthetic construct
  misc_feature 1..131: note = Description of Artificial Sequence: Synthetic polynucleotide
  source 1..131: mol_type = other RNA
tttggtgactgccacgcccagttttagagctagaaatagcaagttaaaataaggctagtccgttatcaacttgaaaaagtggcaccgagtcggtgcagcagtgaacaccccttgggcgtggcagtcaccaa

SEQ ID NO: 3264 - RNA, 131 nt, synthetic construct
  misc_feature 1..131: note = Description of Artificial Sequence: Synthetic polynucleotide
  source 1..131: mol_type = other RNA
tttggtgactgccacgcccagttttagagctagaaatagcaagttaaaataaggctagtccgttatcaacttgaaaaagtggcaccgagtcggtgcgtgaacatccgttgggcgtggcagtcaccaatttt

SEQ ID NO: 3265 - RNA, 131 nt, synthetic construct
  misc_feature 1..131: note = Description of Artificial Sequence: Synthetic polynucleotide
  source 1..131: mol_type = other RNA
gtttggtgactgccacgcccagttttagagctagaaatagcaagttaaaataaggctagtccgttatcaacttgaaaaagtggcaccgagtcggtgcgcagtgaacacccattgggcgtggcagttttttt

SEQ ID NO: 3266 - RNA, 132 nt, synthetic construct
  misc_feature 1..132: note = Description of Artificial Sequence: Synthetic polynucleotide
  source 1..132: mol_type = other RNA
gtttggtgactgccacgcccagttttagagctagaaatagcaagttaaaataaggctagtccgttatcaacttgaaaaagtggcaccgagtcggtgcgtgaacaccctttgggcgtggcagtcacctttttt

SEQ ID NO: 3267 - RNA, 132 nt, synthetic construct
  misc_feature 1..132: note = Description of Artificial Sequence: Synthetic polynucleotide
  source 1..132: mol_type = other RNA
tttggtgactgccacgcccagttttagagctagaaatagcaagttaaaataaggctagtccgttatcaacttgaaaaagtggcaccgagtcggtgcgccagcagtgaacatccgttgggcgtggcagttttt

SEQ ID NO: 3268 - RNA, 132 nt, synthetic construct
  misc_feature 1..132: note = Description of Artificial Sequence: Synthetic polynucleotide
  source 1..132: mol_type = other RNA
tttggtgactgccacgcccagttttagagctagaaatagcaagttaaaataaggctagtccgttatcaacttgaaaaagtggcaccgagtcggtgcagtgaacatccgttgggcgtggcagtcaccaatttt

SEQ ID NO: 3269 - RNA, 132 nt, synthetic construct
  misc_feature 1..132: note = Description of Artificial Sequence: Synthetic polynucleotide
  source 1..132: mol_type = other RNA
gtttggtgactgccacgcccagttttagagctagaaatagcaagttaaaataaggctagtccgttatcaacttgaaaaagtggcaccgagtcggtgcgtgaacacccgttgggcgtggcagtcacttttttt

SEQ ID NO: 3270 - RNA, 132 nt, synthetic construct
  misc_feature 1..132: note = Description of Artificial Sequence: Synthetic polynucleotide
  source 1..132: mol_type = other RNA
gtttggtgactgccacgcccagttttagagctagaaatagcaagttaaaataaggctagtccgttatcaacttgaaaaagtggcaccgagtcggtgcgaacacccattgggcgtggcagtcaccaatttttt

SEQ ID NO: 3271 - RNA, 132 nt, synthetic construct
  misc_feature 1..132: note = Description of Artificial Sequence: Synthetic polynucleotide
  source 1..132: mol_type = other RNA
tttggtgactgccacgcccagttttagagctagaaatagcaagttaaaataaggctagtccgttatcaacttgaaaaagtggcaccgagtcggtgctgcggaggccagcagtgaacacccgttgggcgtggc

SEQ ID NO: 3272 - RNA, 132 nt, synthetic construct
  misc_feature 1..132: note = Description of Artificial Sequence: Synthetic polynucleotide
  source 1..132: mol_type = other RNA
tttggtgactgccacgcccagttttagagctagaaatagcaagttaaaataaggctagtccgttatcaacttgaaaaagtggcaccgagtcggtgcgcagtgaacatccgttgggcgtggcagtcacctttt

SEQ ID NO: 3273 - RNA, 132 nt, synthetic construct
  misc_feature 1..132: note = Description of Artificial Sequence: Synthetic polynucleotide
  source 1..132: mol_type = other RNA
tttggtgactgccacgcccagttttagagctagaaatagcaagttaaaataaggctagtccgttatcaacttgaaaaagtggcaccgagtcggtgcggccagcagtgaacaccccttgggcgtggcagtcac

SEQ ID NO: 3274 - RNA, 132 nt, synthetic construct
  misc_feature 1..132: note = Description of Artificial Sequence: Synthetic polynucleotide
  source 1..132: mol_type = other RNA
gtttggtgactgccacgcccagttttagagctagaaatagcaagttaaaataaggctagtccgttatcaacttgaaaaagtggcaccgagtcggtgctgaacacccattgggcgtggcagtcaccttttttt

SEQ ID NO: 3275 - RNA, 132 nt, synthetic construct
  misc_feature 1..132: note = Description of Artificial Sequence: Synthetic polynucleotide
  source 1..132: mol_type = other RNA
tttggtgactgccacgcccagttttagagctagaaatagcaagttaaaataaggctagtccgttatcaacttgaaaaagtggcaccgagtcggtgcgccagcagtgaacaccctttgggcgtggcagtcacc

SEQ ID NO: 3276 - RNA, 132 nt, synthetic construct
  misc_feature 1..132: note = Description of Artificial Sequence: Synthetic polynucleotide
  source 1..132: mol_type = other RNA
tttggtgactgccacgcccagttttagagctagaaatagcaagttaaaataaggctagtccgttatcaacttgaaaaagtggcaccgagtcggtgcagtgaacaccccttgggcgtggcagtcaccaatttt

SEQ ID NO: 3277 - RNA, 132 nt, synthetic construct
  misc_feature 1..132: note = Description of Artificial Sequence: Synthetic polynucleotide
  source 1..132: mol_type = other RNA
tttggtgactgccacgcccagttttagagctagaaatagcaagttaaaataaggctagtccgttatcaacttgaaaaagtggcaccgagtcggtgcagtgaacacccgttgggcgtggcagtcaccaatttt

SEQ ID NO: 3278 - RNA, 132 nt, synthetic construct
  misc_feature 1..132: note = Description of Artificial Sequence: Synthetic polynucleotide
  source 1..132: mol_type = other RNA
gtttggtgactgccacgcccagttttagagctagaaatagcaagttaaaataaggctagtccgttatcaacttgaaaaagtggcaccgagtcggtgcgcagtgaacaccctttgggcgtggcagtttttttt

SEQ ID NO: 3279 - RNA, 132 nt, synthetic construct
  misc_feature 1..132: note = Description of Artificial Sequence: Synthetic polynucleotide
  source 1..132: mol_type = other RNA
tttggtgactgccacgcccagttttagagctagaaatagcaagttaaaataaggctagtccgttatcaacttgaaaaagtggcaccgagtcggtgcagtgaacatcccttgggcgtggcagtcaccaatttt

SEQ ID NO: 3280 - RNA, 132 nt, synthetic construct
  misc_feature 1..132: note = Description of Artificial Sequence: Synthetic polynucleotide
  source 1..132: mol_type = other RNA
gtttggtgactgccacgcccagttttagagctagaaatagcaagttaaaataaggctagtccgttatcaacttgaaaaagtggcaccgagtcggtgcagcagtgaacaccccttgggcgtggcagttttttt

SEQ ID NO: 3281 - RNA, 132 nt, synthetic construct
  misc_feature 1..132: note = Description of Artificial Sequence: Synthetic polynucleotide
  source 1..132: mol_type = other RNA
tttggtgactgccacgcccagttttagagctagaaatagcaagttaaaataaggctagtccgttatcaacttgaaaaagtggcaccgagtcggtgcaggccagcagtgaacacccattgggcgtggcagtca

SEQ ID NO: 3282 - RNA, 132 nt, synthetic construct
  misc_feature 1..132: note = Description of Artificial Sequence: Synthetic polynucleotide
  source 1..132: mol_type = other RNA
tttggtgactgccacgcccagttttagagctagaaatagcaagttaaaataaggctagtccgttatcaacttgaaaaagtggcaccgagtcggtgctgcggaggccagcagtgaacaccccttgggcgtggc

SEQ ID NO: 3283 - RNA, 132 nt, synthetic construct
  misc_feature 1..132: note = Description of Artificial Sequence: Synthetic polynucleotide
  source 1..132: mol_type = other RNA
tttggtgactgccacgcccagttttagagctagaaatagcaagttaaaataaggctagtccgttatcaacttgaaaaagtggcaccgagtcggtgcggaggccagcagtgaacaccccttgggcgtggcagt

SEQ ID NO: 3284 - RNA, 132 nt, synthetic construct
  misc_feature 1..132: note = Description of Artificial Sequence: Synthetic polynucleotide
  source 1..132: mol_type = other RNA
gtttggtgactgccacgcccagttttagagctagaaatagcaagttaaaataaggctagtccgttatcaacttgaaaaagtggcaccgagtcggtgcagcagtgaacacccgttgggcgtggcagttttttt

SEQ ID NO: 3285 - RNA, 132 nt, synthetic construct
  misc_feature 1..132: note = Description of Artificial Sequence: Synthetic polynucleotide
  source 1..132: mol_type = other RNA
gtttggtgactgccacgcccagttttagagctagaaatagcaagttaaaataaggctagtccgttatcaacttgaaaaagtggcaccgagtcggtgctgaacacccgttgggcgtggcagtcaccttttttt

SEQ ID NO: 3286 - RNA, 132 nt, synthetic construct
  misc_feature 1..132: note = Description of Artificial Sequence: Synthetic polynucleotide
  source 1..132: mol_type = other RNA
tttggtgactgccacgcccagttttagagctagaaatagcaagttaaaataaggctagtccgttatcaacttgaaaaagtggcaccgagtcggtgcgcagtgaacatcccttgggcgtggcagtcacctttt

SEQ ID NO: 3287 - RNA, 132 nt, synthetic construct
  misc_feature 1..132: note = Description of Artificial Sequence: Synthetic polynucleotide
  source 1..132: mol_type = other RNA
tttggtgactgccacgcccagttttagagctagaaatagcaagttaaaataaggctagtccgttatcaacttgaaaaagtggcaccgagtcggtgcgccagcagtgaacaccccttgggcgtggcagtcacc

SEQ ID NO: 3288 - RNA, 132 nt, synthetic construct
  misc_feature 1..132: note = Description of Artificial Sequence: Synthetic polynucleotide
  source 1..132: mol_type = other RNA
tttggtgactgccacgcccagttttagagctagaaatagcaagttaaaataaggctagtccgttatcaacttgaaaaagtggcaccgagtcggtgcgccagcagtgaacatcccttgggcgtggcagtcacc

SEQ ID NO: 3289 - RNA, 132 nt, synthetic construct
  misc_feature 1..132: note = Description of Artificial Sequence: Synthetic polynucleotide
  source 1..132: mol_type = other RNA
tttggtgactgccacgcccagttttagagctagaaatagcaagttaaaataaggctagtccgttatcaacttgaaaaagtggcaccgagtcggtgcgccagcagtgaacatccgttgggcgtggcagtcacc

SEQ ID NO: 3290 - RNA, 132 nt, synthetic construct
  misc_feature 1..132: note = Description of Artificial Sequence: Synthetic polynucleotide
  source 1..132: mol_type = other RNA
gtttggtgactgccacgcccagttttagagctagaaatagcaagttaaaataaggctagtccgttatcaacttgaaaaagtggcaccgagtcggtgcgtgaacacccgttgggcgtggcagtcacctttttt

SEQ ID NO: 3291 - RNA, 132 nt, synthetic construct
  misc_feature 1..132: note = Description of Artificial Sequence: Synthetic polynucleotide
  source 1..132: mol_type = other RNA
gtttggtgactgccacgcccagttttagagctagaaatagcaagttaaaataaggctagtccgttatcaacttgaaaaagtggcaccgagtcggtgcgtgaacaccccttgggcgtggcagtcacctttttt

SEQ ID NO: 3292 - RNA, 132 nt, synthetic construct
  misc_feature 1..132: note = Description of Artificial Sequence: Synthetic polynucleotide
  source 1..132: mol_type = other RNA
gtttggtgactgccacgcccagttttagagctagaaatagcaagttaaaataaggctagtccgttatcaacttgaaaaagtggcaccgagtcggtgcgtgaacaccctttgggcgtggcagtcacttttttt

SEQ ID NO: 3293 - RNA, 132 nt, synthetic construct
  misc_feature 1..132: note = Description of Artificial Sequence: Synthetic polynucleotide
  source 1..132: mol_type = other RNA
gtttggtgactgccacgcccagttttagagctagaaatagcaagttaaaataaggctagtccgttatcaacttgaaaaagtggcaccgagtcggtgcagtgaacacccattgggcgtggcagtcattttttt

SEQ ID NO: 3294 - RNA, 132 nt, synthetic construct
  misc_feature 1..132: note = Description of Artificial Sequence: Synthetic polynucleotide
  source 1..132: mol_type = other RNA
gtttggtgactgccacgcccagttttagagctagaaatagcaagttaaaataaggctagtccgttatcaacttgaaaaagtggcaccgagtcggtgcgtgaacacccattgggcgtggcagtcacttttttt

SEQ ID NO: 3295 - RNA, 132 nt, synthetic construct
  misc_feature 1..132: note = Description of Artificial Sequence: Synthetic polynucleotide
  source 1..132: mol_type = other RNA
gtttggtgactgccacgcccagttttagagctagaaatagcaagttaaaataaggctagtccgttatcaacttgaaaaagtggcaccgagtcggtgcgtgaacacccattgggcgtggcagtcacctttttt

SEQ ID NO: 3296 - RNA, 132 nt, synthetic construct
  misc_feature 1..132: note = Description of Artificial Sequence: Synthetic polynucleotide
  source 1..132: mol_type = other RNA
gtttggtgactgccacgcccagttttagagctagaaatagcaagttaaaataaggctagtccgttatcaacttgaaaaagtggcaccgagtcggtgcagtgaacaccccttgggcgtggcagtcattttttt

SEQ ID NO: 3297 - RNA, 132 nt, synthetic construct
  misc_feature 1..132: note = Description of Artificial Sequence: Synthetic polynucleotide
  source 1..132: mol_type = other RNA
tttggtgactgccacgcccagttttagagctagaaatagcaagttaaaataaggctagtccgttatcaacttgaaaaagtggcaccgagtcggtgcgccagcagtgaacatcccttgggcgtggcagttttt

SEQ ID NO: 3298 - RNA, 132 nt, synthetic construct
  misc_feature 1..132: note = Description of Artificial Sequence: Synthetic polynucleotide
  source 1..132: mol_type = other RNA
gtttggtgactgccacgcccagttttagagctagaaatagcaagttaaaataaggctagtccgttatcaacttgaaaaagtggcaccgagtcggtgcgcagtgaacacccattgggcgtggcagtttttttt

SEQ ID NO: 3299 - RNA, 132 nt, synthetic construct
  misc_feature 1..132: note = Description of Artificial Sequence: Synthetic polynucleotide
  source 1..132: mol_type = other RNA
gtttggtgactgccacgcccagttttagagctagaaatagcaagttaaaataaggctagtccgttatcaacttgaaaaagtggcaccgagtcggtgctgaacaccccttgggcgtggcagtcaccttttttt

SEQ ID NO: 3300 - RNA, 132 nt, synthetic construct
  misc_feature 1..132: note = Description of Artificial Sequence: Synthetic polynucleotide
  source 1..132: mol_type = other RNA
tttggtgactgccacgcccagttttagagctagaaatagcaagttaaaataaggctagtccgttatcaacttgaaaaagtggcaccgagtcggtgcgccagcagtgaacacccattgggcgtggcagtcacc

SEQ ID NO: 3301 - RNA, 132 nt, synthetic construct
  misc_feature 1..132: note = Description of Artificial Sequence: Synthetic polynucleotide
  source 1..132: mol_type = other RNA
tttggtgactgccacgcccagttttagagctagaaatagcaagttaaaataaggctagtccgttatcaacttgaaaaagtggcaccgagtcggtgcgccagcagtgaacacccgttgggcgtggcagtcacc

SEQ ID NO: 3302 - RNA, 132 nt, synthetic construct
  misc_feature 1..132: note = Description of Artificial Sequence: Synthetic polynucleotide
  source 1..132: mol_type = other RNA
tttggtgactgccacgcccagttttagagctagaaatagcaagttaaaataaggctagtccgttatcaacttgaaaaagtggcaccgagtcggtgcgcggaggccagcagtgaacaccctttgggcgtggca

SEQ ID NO: 3303 - RNA, 132 nt, synthetic construct
  misc_feature 1..132: note = Description of Artificial Sequence: Synthetic polynucleotide
  source 1..132: mol_type = other RNA
tttggtgactgccacgcccagttttagagctagaaatagcaagttaaaataaggctagtccgttatcaacttgaaaaagtggcaccgagtcggtgcggaggccagcagtgaacacccattgggcgtggcagt

SEQ ID NO: 3304 - RNA, 132 nt, synthetic construct
  misc_feature 1..132: note = Description of Artificial Sequence: Synthetic polynucleotide
  source 1..132: mol_type = other RNA
tttggtgactgccacgcccagttttagagctagaaatagcaagttaaaataaggctagtccgttatcaacttgaaaaagtggcaccgagtcggtgcggccagcagtgaacacccgttgggcgtggcagtcac

SEQ ID NO: 3305 - RNA, 132 nt, synthetic construct
  misc_feature 1..132: note = Description of Artificial Sequence: Synthetic polynucleotide
  source 1..132: mol_type = other RNA
tttggtgactgccacgcccagttttagagctagaaatagcaagttaaaataaggctagtccgttatcaacttgaaaaagtggcaccgagtcggtgcgaggccagcagtgaacacccattgggcgtggcagtc

SEQ ID NO: 3306 - RNA, 132 nt, synthetic construct
  misc_feature 1..132: note = Description of Artificial Sequence: Synthetic polynucleotide
  source 1..132: mol_type = other RNA
gtttggtgactgccacgcccagttttagagctagaaatagcaagttaaaataaggctagtccgttatcaacttgaaaaagtggcaccgagtcggtgcgcagtgaacacccgttgggcgtggcagtttttttt

SEQ ID NO: 3307 - RNA, 132 nt, synthetic construct
  misc_feature 1..132: note = Description of Artificial Sequence: Synthetic polynucleotide
  source 1..132: mol_type = other RNA
tttggtgactgccacgcccagttttagagctagaaatagcaagttaaaataaggctagtccgttatcaacttgaaaaagtggcaccgagtcggtgcgaggccagcagtgaacaccccttgggcgtggcagtc

SEQ ID NO: 3308 - RNA, 132 nt, synthetic construct
  misc_feature 1..132: note = Description of Artificial Sequence: Synthetic polynucleotide
  source 1..132: mol_type = other RNA
gtttggtgactgccacgcccagttttagagctagaaatagcaagttaaaataaggctagtccgttatcaacttgaaaaagtggcaccgagtcggtgcgcagtgaacaccccttgggcgtggcagtttttttt

SEQ ID NO: 3309 - RNA, 132 nt, synthetic construct
  misc_feature 1..132: note = Description of Artificial Sequence: Synthetic polynucleotide
  source 1..132: mol_type = other RNA
gtttggtgactgccacgcccagttttagagctagaaatagcaagttaaaataaggctagtccgttatcaacttgaaaaagtggcaccgagtcggtgcgtgaacaccccttgggcgtggcagtcacttttttt

SEQ ID NO: 3310 - RNA, 132 nt, synthetic construct
  misc_feature 1..132: note = Description of Artificial Sequence: Synthetic polynucleotide
  source 1..132: mol_type = other RNA
tttggtgactgccacgcccagttttagagctagaaatagcaagttaaaataaggctagtccgttatcaacttgaaaaagtggcaccgagtcggtgcgaggccagcagtgaacacccgttgggcgtggcagtc

SEQ ID NO: 3311 - RNA, 132 nt, synthetic construct
  misc_feature 1..132: note = Description of Artificial Sequence: Synthetic polynucleotide
  source 1..132: mol_type = other RNA
tttggtgactgccacgcccagttttagagctagaaatagcaagttaaaataaggctagtccgttatcaacttgaaaaagtggcaccgagtcggtgcggaggccagcagtgaacaccctttgggcgtggcagt

SEQ ID NO: 3312 - RNA, 132 nt, synthetic construct
  misc_feature 1..132: note = Description of Artificial Sequence: Synthetic polynucleotide
  source 1..132: mol_type = other RNA
tttggtgactgccacgcccagttttagagctagaaatagcaagttaaaataaggctagtccgttatcaacttgaaaaagtggcaccgagtcggtgcggaggccagcagtgaacacccgttgggcgtggcagt

SEQ ID NO: 3313 - RNA, 132 nt, synthetic construct
  misc_feature 1..132: note = Description of Artificial Sequence: Synthetic polynucleotide
  source 1..132: mol_type = other RNA
tttggtgactgccacgcccagttttagagctagaaatagcaagttaaaataaggctagtccgttatcaacttgaaaaagtggcaccgagtcggtgcaggccagcagtgaacacccgttgggcgtggcagtca

SEQ ID NO: 3314 - RNA, 132 nt, synthetic construct
  misc_feature 1..132: note = Description of Artificial Sequence: Synthetic polynucleotide
  source 1..132: mol_type = other RNA
tttggtgactgccacgcccagttttagagctagaaatagcaagttaaaataaggctagtccgttatcaacttgaaaaagtggcaccgagtcggtgcaggccagcagtgaacaccctttgggcgtggcagtca

SEQ ID NO: 3315 - RNA, 132 nt, synthetic construct
  misc_feature 1..132: note = Description of Artificial Sequence: Synthetic polynucleotide
  source 1..132: mol_type = other RNA
tttggtgactgccacgcccagttttagagctagaaatagcaagttaaaataaggctagtccgttatcaacttgaaaaagtggcaccgagtcggtgcgaggccagcagtgaacaccctttgggcgtggcagtc

SEQ ID NO: 3316 - RNA, 132 nt, synthetic construct
  misc_feature 1..132: note = Description of Artificial Sequence: Synthetic polynucleotide
  source 1..132: mol_type = other RNA
tttggtgactgccacgcccagttttagagctagaaatagcaagttaaaataaggctagtccgttatcaacttgaaaaagtggcaccgagtcggtgctgcggaggccagcagtgaacaccctttgggcgtggc

SEQ ID NO: 3317 - RNA, 132 nt, synthetic construct
  misc_feature 1..132: note = Description of Artificial Sequence: Synthetic polynucleotide
  source 1..132: mol_type = other RNA
tttggtgactgccacgcccagttttagagctagaaatagcaagttaaaataaggctagtccgttatcaacttgaaaaagtggcaccgagtcggtgcgcggaggccagcagtgaacacccattgggcgtggca

SEQ ID NO: 3318 - RNA, 132 nt, synthetic construct
  misc_feature 1..132: note = Description of Artificial Sequence: Synthetic polynucleotide
  source 1..132: mol_type = other RNA
tttggtgactgccacgcccagttttagagctagaaatagcaagttaaaataaggctagtccgttatcaacttgaaaaagtggcaccgagtcggtgcgcggaggccagcagtgaacacccgttgggcgtggca

SEQ ID NO: 3319 - RNA, 132 nt, synthetic construct
  misc_feature 1..132: note = Description of Artificial Sequence: Synthetic polynucleotide
  source 1..132: mol_type = other RNA
gtttggtgactgccacgcccagttttagagctagaaatagcaagttaaaataaggctagtccgttatcaacttgaaaaagtggcaccgagtcggtgcgaacacccgttgggcgtggcagtcaccaatttttt

SEQ ID NO: 3320 - RNA, 132 nt, synthetic construct
  misc_feature 1..132: note = Description of Artificial Sequence: Synthetic polynucleotide
  source 1..132: mol_type = other RNA
gtttggtgactgccacgcccagttttagagctagaaatagcaagttaaaataaggctagtccgttatcaacttgaaaaagtggcaccgagtcggtgcgaacaccctttgggcgtggcagtcaccaatttttt

SEQ ID NO: 3321 - RNA, 132 nt, synthetic construct
  misc_feature 1..132: note = Description of Artificial Sequence: Synthetic polynucleotide
  source 1..132: mol_type = other RNA
gtttggtgactgccacgcccagttttagagctagaaatagcaagttaaaataaggctagtccgttatcaacttgaaaaagtggcaccgagtcggtgcgaacaccccttgggcgtggcagtcaccaatttttt

SEQ ID NO: 3322 - RNA, 132 nt, synthetic construct
  misc_feature 1..132: note = Description of Artificial Sequence: Synthetic polynucleotide
  source 1..132: mol_type = other RNA
tttggtgactgccacgcccagttttagagctagaaatagcaagttaaaataaggctagtccgttatcaacttgaaaaagtggcaccgagtcggtgcaggccagcagtgaacaccccttgggcgtggcagtca

SEQ ID NO: 3323 - RNA, 132 nt, synthetic construct
  misc_feature 1..132: note = Description of Artificial Sequence: Synthetic polynucleotide
  source 1..132: mol_type = other RNA
gtttggtgactgccacgcccagttttagagctagaaatagcaagttaaaataaggctagtccgttatcaacttgaaaaagtggcaccgagtcggtgcagcagtgaacaccctttgggcgtggcagttttttt

SEQ ID NO: 3324 - RNA, 132 nt, synthetic construct
  misc_feature 1..132: note = Description of Artificial Sequence: Synthetic polynucleotide
  source 1..132: mol_type = other RNA
tttggtgactgccacgcccagttttagagctagaaatagcaagttaaaataaggctagtccgttatcaacttgaaaaagtggcaccgagtcggtgctgcggaggccagcagtgaacacccattgggcgtggc

SEQ ID NO: 3325 - RNA, 132 nt, synthetic construct
  misc_feature 1..132: note = Description of Artificial Sequence: Synthetic polynucleotide
  source 1..132: mol_type = other RNA
tttggtgactgccacgcccagttttagagctagaaatagcaagttaaaataaggctagtccgttatcaacttgaaaaagtggcaccgagtcggtgcgcggaggccagcagtgaacaccccttgggcgtggca

SEQ ID NO: 3326 - RNA, 132 nt, synthetic construct
  misc_feature 1..132: note = Description of Artificial Sequence: Synthetic polynucleotide
  source 1..132: mol_type = other RNA
gtttggtgactgccacgcccagttttagagctagaaatagcaagttaaaataaggctagtccgttatcaacttgaaaaagtggcaccgagtcggtgcagtgaacaccctttgggcgtggcagtcattttttt

SEQ ID NO: 3327 - RNA, 132 nt, synthetic construct
  misc_feature 1..132: note = Description of Artificial Sequence: Synthetic polynucleotide
  source 1..132: mol_type = other RNA
gtttggtgactgccacgcccagttttagagctagaaatagcaagttaaaataaggctagtccgttatcaacttgaaaaagtggcaccgagtcggtgcagtgaacacccgttgggcgtggcagtcattttttt

SEQ ID NO: 3328 - RNA, 132 nt, synthetic construct
  misc_feature 1..132: note = Description of Artificial Sequence: Synthetic polynucleotide
  source 1..132: mol_type = other RNA
tttggtgactgccacgcccagttttagagctagaaatagcaagttaaaataaggctagtccgttatcaacttgaaaaagtggcaccgagtcggtgcggccagcagtgaacacccattgggcgtggcagtcac

SEQ ID NO: 3329 - RNA, 132 nt, synthetic construct
  misc_feature 1..132: note = Description of Artificial Sequence: Synthetic polynucleotide
  source 1..132: mol_type = other RNA
gtttggtgactgccacgcccagttttagagctagaaatagcaagttaaaataaggctagtccgttatcaacttgaaaaagtggcaccgagtcggtgctgaacaccctttgggcgtggcagtcaccttttttt

SEQ ID NO: 3330 - RNA, 132 nt, synthetic construct
  misc_feature 1..132: note = Description of Artificial Sequence: Synthetic polynucleotide
  source 1..132: mol_type = other RNA
tttggtgactgccacgcccagttttagagctagaaatagcaagttaaaataaggctagtccgttatcaacttgaaaaagtggcaccgagtcggtgcggccagcagtgaacaccctttgggcgtggcagtcac

SEQ ID NO: 3331 - RNA, 132 nt, synthetic construct
  misc_feature 1..132: note = Description of Artificial Sequence: Synthetic polynucleotide
  source 1..132: mol_type = other RNA
gtttggtgactgccacgcccagttttagagctagaaatagcaagttaaaataaggctagtccgttatcaacttgaaaaagtggcaccgagtcggtgcagcagtgaacacccattgggcgtggcagttttttt

SEQ ID NO: 3332 - RNA, 133 nt, synthetic construct
  misc_feature 1..133: note = Description of Artificial Sequence: Synthetic polynucleotide
  source 1..133: mol_type = other RNA
gtttggtgactgccacgcccagttttagagctagaaatagcaagttaaaataaggctagtccgttatcaacttgaaaaagtggcaccgagtcggtgcagtgaacacccgttgggcgtggcagtcacctttttt

SEQ ID NO: 3333 - RNA, 133 nt, synthetic construct
  misc_feature 1..133: note = Description of Artificial Sequence: Synthetic polynucleotide
  source 1..133: mol_type = other RNA
gtttggtgactgccacgcccagttttagagctagaaatagcaagttaaaataaggctagtccgttatcaacttgaaaaagtggcaccgagtcggtgcgcagtgaacacccgttgggcgtggcagtcttttttt

SEQ ID NO: 3334 - RNA, 133 nt, synthetic construct
  misc_feature 1..133: note = Description of Artificial Sequence: Synthetic polynucleotide
  source 1..133: mol_type = other RNA
gtttggtgactgccacgcccagttttagagctagaaatagcaagttaaaataaggctagtccgttatcaacttgaaaaagtggcaccgagtcggtgcagtgaacaccctttgggcgtggcagtcacctttttt

SEQ ID NO: 3335 - RNA, 133 nt, synthetic construct
  misc_feature 1..133: note = Description of Artificial Sequence: Synthetic polynucleotide
  source 1..133: mol_type = other RNA
gtttggtgactgccacgcccagttttagagctagaaatagcaagttaaaataaggctagtccgttatcaacttgaaaaagtggcaccgagtcggtgctgaacaccccttgggcgtggcagtcaccaatttttt

SEQ ID NO: 3336 - RNA, 133 nt, synthetic construct
  misc_feature 1..133: note = Description of Artificial Sequence: Synthetic polynucleotide
  source 1..133: mol_type = other RNA
gtttggtgactgccacgcccagttttagagctagaaatagcaagttaaaataaggctagtccgttatcaacttgaaaaagtggcaccgagtcggtgcgcagtgaacacccgttgggcgtggcagtcatttttt

SEQ ID NO: 3337 - RNA, 133 nt, synthetic construct
  misc_feature 1..133: note = Description of Artificial Sequence: Synthetic polynucleotide
  source 1..133: mol_type = other RNA
gtttggtgactgccacgcccagttttagagctagaaatagcaagttaaaataaggctagtccgttatcaacttgaaaaagtggcaccgagtcggtgcgccagcagtgaacacccattgggcgtggcatttttt

SEQ ID NO: 3338 - RNA, 133 nt, synthetic construct
  misc_feature 1..133: note = Description of Artificial Sequence: Synthetic polynucleotide
  source 1..133: mol_type = other RNA
gtttggtgactgccacgcccagttttagagctagaaatagcaagttaaaataaggctagtccgttatcaacttgaaaaagtggcaccgagtcggtgctgaacaccctttgggcgtggcagtcaccaatttttt

SEQ ID NO: 3339 - RNA, 133 nt, synthetic construct
  misc_feature 1..133: note = Description of Artificial Sequence: Synthetic polynucleotide
  source 1..133: mol_type = other RNA
gtttggtgactgccacgcccagttttagagctagaaatagcaagttaaaataaggctagtccgttatcaacttgaaaaagtggcaccgagtcggtgcgcagtgaacaccccttgggcgtggcagtcttttttt

SEQ ID NO: 3340 - RNA, 133 nt, synthetic construct
  misc_feature 1..133: note = Description of Artificial Sequence: Synthetic polynucleotide
  source 1..133: mol_type = other RNA
gtttggtgactgccacgcccagttttagagctagaaatagcaagttaaaataaggctagtccgttatcaacttgaaaaagtggcaccgagtcggtgcgccagcagtgaacaccccttgggcgtggcttttttt

SEQ ID NO: 3341 - RNA, 133 nt, synthetic construct
  misc_feature 1..133: note = Description of Artificial Sequence: Synthetic polynucleotide
  source 1..133: mol_type = other RNA
gtttggtgactgccacgcccagttttagagctagaaatagcaagttaaaataaggctagtccgttatcaacttgaaaaagtggcaccgagtcggtgcgcagtgaacaccccttgggcgtggcagtcatttttt

SEQ ID NO: 3342 - RNA, 133 nt, synthetic construct
  misc_feature 1..133: note = Description of Artificial Sequence: Synthetic polynucleotide
  source 1..133: mol_type = other RNA
gtttggtgactgccacgcccagttttagagctagaaatagcaagttaaaataaggctagtccgttatcaacttgaaaaagtggcaccgagtcggtgcagcagtgaacaccccttgggcgtggcagtttttttt

SEQ ID NO: 3343 - RNA, 133 nt, synthetic construct
  misc_feature 1..133: note = Description of Artificial Sequence: Synthetic polynucleotide
  source 1..133: mol_type = other RNA
gtttggtgactgccacgcccagttttagagctagaaatagcaagttaaaataaggctagtccgttatcaacttgaaaaagtggcaccgagtcggtgcagtgaacacccattgggcgtggcagtcacttttttt

SEQ ID NO: 3344 - RNA, 133 nt, synthetic construct
  misc_feature 1..133: note = Description of Artificial Sequence: Synthetic polynucleotide
  source 1..133: mol_type = other RNA
gtttggtgactgccacgcccagttttagagctagaaatagcaagttaaaataaggctagtccgttatcaacttgaaaaagtggcaccgagtcggtgcgcagtgaacaccctttgggcgtggcagtcatttttt

SEQ ID NO: 3345 - RNA, 133 nt, synthetic construct
  misc_feature 1..133: note = Description of Artificial Sequence: Synthetic polynucleotide
  source 1..133: mol_type = other RNA
tttggtgactgccacgcccagttttagagctagaaatagcaagttaaaataaggctagtccgttatcaacttgaaaaagtggcaccgagtcggtgcagcagtgaacatccgttgggcgtggcagtcacctttt

SEQ ID NO: 3346 - RNA, 133 nt, synthetic construct
  misc_feature 1..133: note = Description of Artificial Sequence: Synthetic polynucleotide
  source 1..133: mol_type = other RNA
tttggtgactgccacgcccagttttagagctagaaatagcaagttaaaataaggctagtccgttatcaacttgaaaaagtggcaccgagtcggtgcggccagcagtgaacaccccttgggcgtggcagtcacc

SEQ ID NO: 3347 - RNA, 133 nt, synthetic construct
  misc_feature 1..133: note = Description of Artificial Sequence: Synthetic polynucleotide
  source 1..133: mol_type = other RNA
tttggtgactgccacgcccagttttagagctagaaatagcaagttaaaataaggctagtccgttatcaacttgaaaaagtggcaccgagtcggtgcggaggccagcagtgaacaccctttgggcgtggcagtc

SEQ ID NO: 3348 - RNA, 133 nt, synthetic construct
  misc_feature 1..133: note = Description of Artificial Sequence: Synthetic polynucleotide
  source 1..133: mol_type = other RNA
tttggtgactgccacgcccagttttagagctagaaatagcaagttaaaataaggctagtccgttatcaacttgaaaaagtggcaccgagtcggtgctgcggaggccagcagtgaacaccccttgggcgtggca

SEQ ID NO: 3349 - RNA, 133 nt, synthetic construct
  misc_feature 1..133: note = Description of Artificial Sequence: Synthetic polynucleotide
  source 1..133: mol_type = other RNA
tttggtgactgccacgcccagttttagagctagaaatagcaagttaaaataaggctagtccgttatcaacttgaaaaagtggcaccgagtcggtgcgcggaggccagcagtgaacacccattgggcgtggcag

SEQ ID NO: 3350 - RNA, 133 nt, synthetic construct
  misc_feature 1..133: note = Description of Artificial Sequence: Synthetic polynucleotide
  source 1..133: mol_type = other RNA
tttggtgactgccacgcccagttttagagctagaaatagcaagttaaaataaggctagtccgttatcaacttgaaaaagtggcaccgagtcggtgcaggccagcagtgaacaccctttgggcgtggcagtcac

SEQ ID NO: 3351 - RNA, 133 nt, synthetic construct
  misc_feature 1..133: note = Description of Artificial Sequence: Synthetic polynucleotide
  source 1..133: mol_type = other RNA
gtttggtgactgccacgcccagttttagagctagaaatagcaagttaaaataaggctagtccgttatcaacttgaaaaagtggcaccgagtcggtgcgtgaacacccgttgggcgtggcagtcaccttttttt

SEQ ID NO: 3352 - RNA, 133 nt, synthetic construct
  misc_feature 1..133: note = Description of Artificial Sequence: Synthetic polynucleotide
  source 1..133: mol_type = other RNA
gtttggtgactgccacgcccagttttagagctagaaatagcaagttaaaataaggctagtccgttatcaacttgaaaaagtggcaccgagtcggtgcgccagcagtgaacaccctttgggcgtggcttttttt

SEQ ID NO: 3353 - RNA, 133 nt, synthetic construct
  misc_feature 1..133: note = Description of Artificial Sequence: Synthetic polynucleotide
  source 1..133: mol_type = other RNA
gtttggtgactgccacgcccagttttagagctagaaatagcaagttaaaataaggctagtccgttatcaacttgaaaaagtggcaccgagtcggtgcgtgaacaccccttgggcgtggcagtcaccttttttt

SEQ ID NO: 3354 - RNA, 133 nt, synthetic construct
  misc_feature 1..133: note = Description of Artificial Sequence: Synthetic polynucleotide
  source 1..133: mol_type = other RNA
gtttggtgactgccacgcccagttttagagctagaaatagcaagttaaaataaggctagtccgttatcaacttgaaaaagtggcaccgagtcggtgcgccagcagtgaacaccctttgggcgtggcatttttt

SEQ ID NO: 3355 - RNA, 133 nt, synthetic construct
  misc_feature 1..133: note = Description of Artificial Sequence: Synthetic polynucleotide
  source 1..133: mol_type = other RNA
tttggtgactgccacgcccagttttagagctagaaatagcaagttaaaataaggctagtccgttatcaacttgaaaaagtggcaccgagtcggtgcagcagtgaacatcccttgggcgtggcagtcacctttt

SEQ ID NO: 3356 - RNA, 133 nt, synthetic construct
  misc_feature 1..133: note = Description of Artificial Sequence: Synthetic polynucleotide
  source 1..133: mol_type = other RNA
gtttggtgactgccacgcccagttttagagctagaaatagcaagttaaaataaggctagtccgttatcaacttgaaaaagtggcaccgagtcggtgcgccagcagtgaacacccgttgggcgtggcttttttt

SEQ ID NO: 3357 - RNA, 133 nt, synthetic construct
  misc_feature 1..133: note = Description of Artificial Sequence: Synthetic polynucleotide
  source 1..133: mol_type = other RNA
gtttggtgactgccacgcccagttttagagctagaaatagcaagttaaaataaggctagtccgttatcaacttgaaaaagtggcaccgagtcggtgcgtgaacaccctttgggcgtggcagtcaccttttttt

SEQ ID NO: 3358 - RNA, 133 nt, synthetic construct
  misc_feature 1..133: note = Description of Artificial Sequence: Synthetic polynucleotide
  source 1..133: mol_type = other RNA
tttggtgactgccacgcccagttttagagctagaaatagcaagttaaaataaggctagtccgttatcaacttgaaaaagtggcaccgagtcggtgcaggccagcagtgaacacccgttgggcgtggcagtcac

SEQ ID NO: 3359 - RNA, 133 nt, synthetic construct
  misc_feature 1..133: note = Description of Artificial Sequence: Synthetic polynucleotide
  source 1..133: mol_type = other RNA
tttggtgactgccacgcccagttttagagctagaaatagcaagttaaaataaggctagtccgttatcaacttgaaaaagtggcaccgagtcggtgcaggccagcagtgaacacccattgggcgtggcagtcac

SEQ ID NO: 3360 - RNA, 133 nt, synthetic construct
  misc_feature 1..133: note = Description of Artificial Sequence: Synthetic polynucleotide
  source 1..133: mol_type = other RNA
gtttggtgactgccacgcccagttttagagctagaaatagcaagttaaaataaggctagtccgttatcaacttgaaaaagtggcaccgagtcggtgctgaacacccgttgggcgtggcagtcaccaatttttt

SEQ ID NO: 3361 - RNA, 133 nt, synthetic construct
  misc_feature 1..133: note = Description of Artificial Sequence: Synthetic polynucleotide
  source 1..133: mol_type = other RNA
gtttggtgactgccacgcccagttttagagctagaaatagcaagttaaaataaggctagtccgttatcaacttgaaaaagtggcaccgagtcggtgcagtgaacacccgttgggcgtggcagtcacttttttt

SEQ ID NO: 3362 - RNA, 133 nt, synthetic construct
  misc_feature 1..133: note = Description of Artificial Sequence: Synthetic polynucleotide
  source 1..133: mol_type = other RNA
tttggtgactgccacgcccagttttagagctagaaatagcaagttaaaataaggctagtccgttatcaacttgaaaaagtggcaccgagtcggtgcggccagcagtgaacaccctttgggcgtggcagtcacc

SEQ ID NO: 3363 - RNA, 133 nt, synthetic construct
  misc_feature 1..133: note = Description of Artificial Sequence: Synthetic polynucleotide
  source 1..133: mol_type = other RNA
gtttggtgactgccacgcccagttttagagctagaaatagcaagttaaaataaggctagtccgttatcaacttgaaaaagtggcaccgagtcggtgcagcagtgaacacccgttgggcgtggcagtttttttt

SEQ ID NO: 3364 - RNA, 133 nt, synthetic construct
  misc_feature 1..133: note = Description of Artificial Sequence: Synthetic polynucleotide
  source 1..133: mol_type = other RNA
tttggtgactgccacgcccagttttagagctagaaatagcaagttaaaataaggctagtccgttatcaacttgaaaaagtggcaccgagtcggtgcggccagcagtgaacacccattgggcgtggcagtcacc

SEQ ID NO: 3365 - RNA, 133 nt, synthetic construct
  misc_feature 1..133: note = Description of Artificial Sequence: Synthetic polynucleotide
  source 1..133: mol_type = other RNA
tttggtgactgccacgcccagttttagagctagaaatagcaagttaaaataaggctagtccgttatcaacttgaaaaagtggcaccgagtcggtgcgaggccagcagtgaacacccgttgggcgtggcagtca

SEQ ID NO: 3366 - RNA, 133 nt, synthetic construct
  misc_feature 1..133: note = Description of Artificial Sequence: Synthetic polynucleotide
  source 1..133: mol_type = other RNA
tttggtgactgccacgcccagttttagagctagaaatagcaagttaaaataaggctagtccgttatcaacttgaaaaagtggcaccgagtcggtgcgaggccagcagtgaacacccattgggcgtggcagtca

SEQ ID NO: 3367 - RNA, 133 nt, synthetic construct
  misc_feature 1..133: note = Description of Artificial Sequence: Synthetic polynucleotide
  source 1..133: mol_type = other RNA
tttggtgactgccacgcccagttttagagctagaaatagcaagttaaaataaggctagtccgttatcaacttgaaaaagtggcaccgagtcggtgctgcggaggccagcagtgaacaccctttgggcgtggca

SEQ ID NO: 3368 - RNA, 133 nt, synthetic construct
  misc_feature 1..133: note = Description of Artificial Sequence: Synthetic polynucleotide
  source 1..133: mol_type = other RNA
tttggtgactgccacgcccagttttagagctagaaatagcaagttaaaataaggctagtccgttatcaacttgaaaaagtggcaccgagtcggtgcgcggaggccagcagtgaacacccgttgggcgtggcag

SEQ ID NO: 3369 - RNA, 133 nt, synthetic construct
  misc_feature 1..133: note = Description of Artificial Sequence: Synthetic polynucleotide
  source 1..133: mol_type = other RNA
gtttggtgactgccacgcccagttttagagctagaaatagcaagttaaaataaggctagtccgttatcaacttgaaaaagtggcaccgagtcggtgcagtgaacaccccttgggcgtggcagtcacttttttt

SEQ ID NO: 3370 - RNA, 133 nt, synthetic construct
  misc_feature 1..133: note = Description of Artificial Sequence: Synthetic polynucleotide
  source 1..133: mol_type = other RNA
gtttggtgactgccacgcccagttttagagctagaaatagcaagttaaaataaggctagtccgttatcaacttgaaaaagtggcaccgagtcggtgcagtgaacaccctttgggcgtggcagtcacttttttt

SEQ ID NO: 3371 - RNA, 133 nt, synthetic construct
  misc_feature 1..133: note = Description of Artificial Sequence: Synthetic polynucleotide
  source 1..133: mol_type = other RNA
gtttggtgactgccacgcccagttttagagctagaaatagcaagttaaaataaggctagtccgttatcaacttgaaaaagtggcaccgagtcggtgcgccagcagtgaacaccccttgggcgtggcatttttt

SEQ ID NO: 3372 - RNA, 133 nt, synthetic construct
  misc_feature 1..133: note = Description of Artificial Sequence: Synthetic polynucleotide
  source 1..133: mol_type = other RNA
tttggtgactgccacgcccagttttagagctagaaatagcaagttaaaataaggctagtccgttatcaacttgaaaaagtggcaccgagtcggtgcaggccagcagtgaacaccccttgggcgtggcagtcac

SEQ ID NO: 3373 - RNA, 133 nt, synthetic construct
  misc_feature 1..133: note = Description of Artificial Sequence: Synthetic polynucleotide
  source 1..133: mol_type = other RNA
tttggtgactgccacgcccagttttagagctagaaatagcaagttaaaataaggctagtccgttatcaacttgaaaaagtggcaccgagtcggtgcggaggccagcagtgaacacccgttgggcgtggcagtc

SEQ ID NO: 3374 - RNA, 133 nt, synthetic construct
  misc_feature 1..133: note = Description of Artificial Sequence: Synthetic polynucleotide
  source 1..133: mol_type = other RNA
gtttggtgactgccacgcccagttttagagctagaaatagcaagttaaaataaggctagtccgttatcaacttgaaaaagtggcaccgagtcggtgcgccagcagtgaacacccattgggcgtggcttttttt

SEQ ID NO: 3375 - RNA, 133 nt, synthetic construct
  misc_feature 1..133: note = Description of Artificial Sequence: Synthetic polynucleotide
  source 1..133: mol_type = other RNA
gtttggtgactgccacgcccagttttagagctagaaatagcaagttaaaataaggctagtccgttatcaacttgaaaaagtggcaccgagtcggtgcagtgaacacccattgggcgtggcagtcacctttttt

SEQ ID NO: 3376 - RNA, 133 nt, synthetic construct
  misc_feature 1..133: note = Description of Artificial Sequence: Synthetic polynucleotide
  source 1..133: mol_type = other RNA
gtttggtgactgccacgcccagttttagagctagaaatagcaagttaaaataaggctagtccgttatcaacttgaaaaagtggcaccgagtcggtgctgaacacccattgggcgtggcagtcaccaatttttt

SEQ ID NO: 3377 - RNA, 133 nt, synthetic construct
  misc_feature 1..133: note = Description of Artificial Sequence: Synthetic polynucleotide
  source 1..133: mol_type = other RNA
gtttggtgactgccacgcccagttttagagctagaaatagcaagttaaaataaggctagtccgttatcaacttgaaaaagtggcaccgagtcggtgcgtgaacacccattgggcgtggcagtcaccttttttt

SEQ ID NO: 3378 - RNA, 133 nt, synthetic construct
  misc_feature 1..133: note = Description of Artificial Sequence: Synthetic polynucleotide
  source 1..133: mol_type = other RNA
gtttggtgactgccacgcccagttttagagctagaaatagcaagttaaaataaggctagtccgttatcaacttgaaaaagtggcaccgagtcggtgcgcagtgaacacccattgggcgtggcagtcatttttt

SEQ ID NO: 3379 - RNA, 133 nt, synthetic construct
  misc_feature 1..133: note = Description of Artificial Sequence: Synthetic polynucleotide
  source 1..133: mol_type = other RNA
gtttggtgactgccacgcccagttttagagctagaaatagcaagttaaaataaggctagtccgttatcaacttgaaaaagtggcaccgagtcggtgcgcagtgaacacccattgggcgtggcagtcttttttt

SEQ ID NO: 3380 - RNA, 133 nt, synthetic construct
  misc_feature 1..133: note = Description of Artificial Sequence: Synthetic polynucleotide
  source 1..133: mol_type = other RNA
gtttggtgactgccacgcccagttttagagctagaaatagcaagttaaaataaggctagtccgttatcaacttgaaaaagtggcaccgagtcggtgcgcagtgaacaccctttgggcgtggcagtcttttttt

SEQ ID NO: 3381 - RNA, 133 nt, synthetic construct
  misc_feature 1..133: note = Description of Artificial Sequence: Synthetic polynucleotide
  source 1..133: mol_type = other RNA
gtttggtgactgccacgcccagttttagagctagaaatagcaagttaaaataaggctagtccgttatcaacttgaaaaagtggcaccgagtcggtgcagtgaacaccccttgggcgtggcagtcacctttttt

SEQ ID NO: 3382 - RNA, 133 nt, synthetic construct
  misc_feature 1..133: note = Description of Artificial Sequence: Synthetic polynucleotide
  source 1..133: mol_type = other RNA
tttggtgactgccacgcccagttttagagctagaaatagcaagttaaaataaggctagtccgttatcaacttgaaaaagtggcaccgagtcggtgcgcggaggccagcagtgaacaccctttgggcgtggcag

SEQ ID NO: 3383 - RNA, 133 nt, synthetic construct
  misc_feature 1..133: note = Description of Artificial Sequence: Synthetic polynucleotide
  source 1..133: mol_type = other RNA
gtttggtgactgccacgcccagttttagagctagaaatagcaagttaaaataaggctagtccgttatcaacttgaaaaagtggcaccgagtcggtgcagcagtgaacacccattgggcgtggcagtttttttt

SEQ ID NO: 3384 - RNA, 133 nt, synthetic construct
  misc_feature 1..133: note = Description of Artificial Sequence: Synthetic polynucleotide
  source 1..133: mol_type = other RNA
gtttggtgactgccacgcccagttttagagctagaaatagcaagttaaaataaggctagtccgttatcaacttgaaaaagtggcaccgagtcggtgcagcagtgaacaccctttgggcgtggcagtttttttt

SEQ ID NO: 3385 - RNA, 133 nt, synthetic construct
  misc_feature 1..133: note = Description of Artificial Sequence: Synthetic polynucleotide
  source 1..133: mol_type = other RNA
tttggtgactgccacgcccagttttagagctagaaatagcaagttaaaataaggctagtccgttatcaacttgaaaaagtggcaccgagtcggtgcggaggccagcagtgaacacccattgggcgtggcagtc

SEQ ID NO: 3386 - RNA, 133 nt, synthetic construct
  misc_feature 1..133: note = Description of Artificial Sequence: Synthetic polynucleotide
  source 1..133: mol_type = other RNA
gtttggtgactgccacgcccagttttagagctagaaatagcaagttaaaataaggctagtccgttatcaacttgaaaaagtggcaccgagtcggtgcgccagcagtgaacacccgttgggcgtggcatttttt

SEQ ID NO: 3387 - RNA, 133 nt, synthetic construct
  misc_feature 1..133: note = Description of Artificial Sequence: Synthetic polynucleotide
  source 1..133: mol_type = other RNA
tttggtgactgccacgcccagttttagagctagaaatagcaagttaaaataaggctagtccgttatcaacttgaaaaagtggcaccgagtcggtgcggccagcagtgaacacccgttgggcgtggcagtcacc

SEQ ID NO: 3388 - RNA, 133 nt, synthetic construct
  misc_feature 1..133: note = Description of Artificial Sequence: Synthetic polynucleotide
  source 1..133: mol_type = other RNA
tttggtgactgccacgcccagttttagagctagaaatagcaagttaaaataaggctagtccgttatcaacttgaaaaagtggcaccgagtcggtgcgaggccagcagtgaacaccctttgggcgtggcagtca

SEQ ID NO: 3389 - RNA, 133 nt, synthetic construct
  misc_feature 1..133: note = Description of Artificial Sequence: Synthetic polynucleotide
  source 1..133: mol_type = other RNA
tttggtgactgccacgcccagttttagagctagaaatagcaagttaaaataaggctagtccgttatcaacttgaaaaagtggcaccgagtcggtgctgcggaggccagcagtgaacacccgttgggcgtggca

SEQ ID NO: 3390 - RNA, 133 nt, synthetic construct
  misc_feature 1..133: note = Description of Artificial Sequence: Synthetic polynucleotide
  source 1..133: mol_type = other RNA
tttggtgactgccacgcccagttttagagctagaaatagcaagttaaaataaggctagtccgttatcaacttgaaaaagtggcaccgagtcggtgcggaggccagcagtgaacaccccttgggcgtggcagtc

SEQ ID NO: 3391 - RNA, 133 nt, synthetic construct
  misc_feature 1..133: note = Description of Artificial Sequence: Synthetic polynucleotide
  source 1..133: mol_type = other RNA
tttggtgactgccacgcccagttttagagctagaaatagcaagttaaaataaggctagtccgttatcaacttgaaaaagtggcaccgagtcggtgcgcggaggccagcagtgaacaccccttgggcgtggcag

SEQ ID NO: 3392 - RNA, 133 nt, synthetic construct
  misc_feature 1..133: note = Description of Artificial Sequence: Synthetic polynucleotide
  source 1..133: mol_type = other RNA
tttggtgactgccacgcccagttttagagctagaaatagcaagttaaaataaggctagtccgttatcaacttgaaaaagtggcaccgagtcggtgctgcggaggccagcagtgaacacccattgggcgtggca

SEQ ID NO: 3393 - RNA, 133 nt, synthetic construct
  misc_feature 1..133: note = Description of Artificial Sequence: Synthetic polynucleotide
  source 1..133: mol_type = other RNA
tttggtgactgccacgcccagttttagagctagaaatagcaagttaaaataaggctagtccgttatcaacttgaaaaagtggcaccgagtcggtgcgaggccagcagtgaacaccccttgggcgtggcagtca

SEQ ID NO: 3394 - RNA, 134 nt, synthetic construct
  misc_feature 1..134: note = Description of Artificial Sequence: Synthetic polynucleotide
  source 1..134: mol_type = other RNA
gtttggtgactgccacgcccagttttagagctagaaatagcaagttaaaataaggctagtccgttatcaacttgaaaaagtggcaccgagtcggtgcgccagcagtgaacaccccttgggcgtggcattttttt

SEQ ID NO: 3395 - RNA, 134 nt, synthetic construct
  misc_feature 1..134: note = Description of Artificial Sequence: Synthetic polynucleotide
  source 1..134: mol_type = other RNA
gtttggtgactgccacgcccagttttagagctagaaatagcaagttaaaataaggctagtccgttatcaacttgaaaaagtggcaccgagtcggtgcgccagcagtgaacacccgttgggcgtggcattttttt

SEQ ID NO: 3396 - RNA, 134 nt, synthetic construct
  misc_feature 1..134: note = Description of Artificial Sequence: Synthetic polynucleotide
  source 1..134: mol_type = other RNA
gtttggtgactgccacgcccagttttagagctagaaatagcaagttaaaataaggctagtccgttatcaacttgaaaaagtggcaccgagtcggtgcgccagcagtgaacaccctttgggcgtggcattttttt

SEQ ID NO: 3397 - RNA, 134 nt, synthetic construct
  misc_feature 1..134: note = Description of Artificial Sequence: Synthetic polynucleotide
  source 1..134: mol_type = other RNA
gtttggtgactgccacgcccagttttagagctagaaatagcaagttaaaataaggctagtccgttatcaacttgaaaaagtggcaccgagtcggtgcggccagcagtgaacacccattgggcgtggcttttttt

SEQ ID NO: 3398 - RNA, 134 nt, synthetic construct
  misc_feature 1..134: note = Description of Artificial Sequence: Synthetic polynucleotide
  source 1..134: mol_type = other RNA
gtttggtgactgccacgcccagttttagagctagaaatagcaagttaaaataaggctagtccgttatcaacttgaaaaagtggcaccgagtcggtgcagcagtgaacaccccttgggcgtggcagtcttttttt

SEQ ID NO: 3399 - RNA, 134 nt, synthetic construct
  misc_feature 1..134: note = Description of Artificial Sequence: Synthetic polynucleotide
  source 1..134: mol_type = other RNA
gtttggtgactgccacgcccagttttagagctagaaatagcaagttaaaataaggctagtccgttatcaacttgaaaaagtggcaccgagtcggtgcggccagcagtgaacaccccttgggcgtggcttttttt

SEQ ID NO: 3400 - RNA, 134 nt, synthetic construct
  misc_feature 1..134: note = Description of Artificial Sequence: Synthetic polynucleotide
  source 1..134: mol_type = other RNA
tttggtgactgccacgcccagttttagagctagaaatagcaagttaaaataaggctagtccgttatcaacttgaaaaagtggcaccgagtcggtgcggaggccagcagtgaacaccctttgggcgtggcagtca

SEQ ID NO: 3401 - RNA, 134 nt, synthetic construct
  misc_feature 1..134: note = Description of Artificial Sequence: Synthetic polynucleotide
  source 1..134: mol_type = other RNA
gtttggtgactgccacgcccagttttagagctagaaatagcaagttaaaataaggctagtccgttatcaacttgaaaaagtggcaccgagtcggtgcagcagtgaacacccgttgggcgtggcagtcttttttt

SEQ ID NO: 3402 - RNA, 134 nt, synthetic construct
  misc_feature 1..134: note = Description of Artificial Sequence: Synthetic polynucleotide
  source 1..134: mol_type = other RNA
gtttggtgactgccacgcccagttttagagctagaaatagcaagttaaaataaggctagtccgttatcaacttgaaaaagtggcaccgagtcggtgcgtgaacaccctttgggcgtggcagtcaccaatttttt

SEQ ID NO: 3403 - RNA, 134 nt, synthetic construct
  misc_feature 1..134: note = Description of Artificial Sequence: Synthetic polynucleotide
  source 1..134: mol_type = other RNA
tttggtgactgccacgcccagttttagagctagaaatagcaagttaaaataaggctagtccgttatcaacttgaaaaagtggcaccgagtcggtgcgaggccagcagtgaacaccctttgggcgtggcagtcac

SEQ ID NO: 3404 - RNA, 134 nt, synthetic construct
  misc_feature 1..134: note = Description of Artificial Sequence: Synthetic polynucleotide
  source 1..134: mol_type = other RNA
tttggtgactgccacgcccagttttagagctagaaatagcaagttaaaataaggctagtccgttatcaacttgaaaaagtggcaccgagtcggtgcaggccagcagtgaacaccccttgggcgtggcagtcacc

SEQ ID NO: 3405 - RNA, 134 nt, synthetic construct
  misc_feature 1..134: note = Description of Artificial Sequence: Synthetic polynucleotide
  source 1..134: mol_type = other RNA
tttggtgactgccacgcccagttttagagctagaaatagcaagttaaaataaggctagtccgttatcaacttgaaaaagtggcaccgagtcggtgcaggccagcagtgaacacccattgggcgtggcagtcacc

SEQ ID NO: 3406 - RNA, 134 nt, synthetic construct
  misc_feature 1..134: note = Description of Artificial Sequence: Synthetic polynucleotide
  source 1..134: mol_type = other RNA
gtttggtgactgccacgcccagttttagagctagaaatagcaagttaaaataaggctagtccgttatcaacttgaaaaagtggcaccgagtcggtgcagtgaacaccctttgggcgtggcagtcaccttttttt

SEQ ID NO: 3407 - RNA, 134 nt, synthetic construct
  misc_feature 1..134: note = Description of Artificial Sequence: Synthetic polynucleotide
  source 1..134: mol_type = other RNA
tttggtgactgccacgcccagttttagagctagaaatagcaagttaaaataaggctagtccgttatcaacttgaaaaagtggcaccgagtcggtgcgcggaggccagcagtgaacacccattgggcgtggcagt

SEQ ID NO: 3408 - RNA, 134 nt, synthetic construct
  misc_feature 1..134: note = Description of Artificial Sequence: Synthetic polynucleotide
  source 1..134: mol_type = other RNA
tttggtgactgccacgcccagttttagagctagaaatagcaagttaaaataaggctagtccgttatcaacttgaaaaagtggcaccgagtcggtgcggaggccagcagtgaacacccgttgggcgtggcagtca

SEQ ID NO: 3409 - RNA, 134 nt, synthetic construct
  misc_feature 1..134: note = Description of Artificial Sequence: Synthetic polynucleotide
  source 1..134: mol_type = other RNA
tttggtgactgccacgcccagttttagagctagaaatagcaagttaaaataaggctagtccgttatcaacttgaaaaagtggcaccgagtcggtgcgcggaggccagcagtgaacacccgttgggcgtggcagt

SEQ ID NO: 3410 - RNA, 134 nt, synthetic construct
  misc_feature 1..134: note = Description of Artificial Sequence: Synthetic polynucleotide
  source 1..134: mol_type = other RNA
gtttggtgactgccacgcccagttttagagctagaaatagcaagttaaaataaggctagtccgttatcaacttgaaaaagtggcaccgagtcggtgcgtgaacacccattgggcgtggcagtcaccaatttttt

SEQ ID NO: 3411 - RNA, 134 nt, synthetic construct
  misc_feature 1..134: note = Description of Artificial Sequence: Synthetic polynucleotide
  source 1..134: mol_type = other RNA
tttggtgactgccacgcccagttttagagctagaaatagcaagttaaaataaggctagtccgttatcaacttgaaaaagtggcaccgagtcggtgcgccagcagtgaacatcccttgggcgtggcagtcatttt

SEQ ID NO: 3412 - RNA, 134 nt, synthetic construct
  misc_feature 1..134: note = Description of Artificial Sequence: Synthetic polynucleotide
  source 1..134: mol_type = other RNA
tttggtgactgccacgcccagttttagagctagaaatagcaagttaaaataaggctagtccgttatcaacttgaaaaagtggcaccgagtcggtgcgaggccagcagtgaacacccgttgggcgtggcagtcac

SEQ ID NO: 3413 - RNA, 134 nt, synthetic construct
  misc_feature 1..134: note = Description of Artificial Sequence: Synthetic polynucleotide
  source 1..134: mol_type = other RNA
gtttggtgactgccacgcccagttttagagctagaaatagcaagttaaaataaggctagtccgttatcaacttgaaaaagtggcaccgagtcggtgcagcagtgaacaccctttgggcgtggcagtcatttttt

SEQ ID NO: 3414 - RNA, 134 nt, synthetic construct
  misc_feature 1..134: note = Description of Artificial Sequence: Synthetic polynucleotide
  source 1..134: mol_type = other RNA
tttggtgactgccacgcccagttttagagctagaaatagcaagttaaaataaggctagtccgttatcaacttgaaaaagtggcaccgagtcggtgcgccagcagtgaacatccgttgggcgtggcagtcaccaa

SEQ ID NO: 3415 - RNA, 134 nt, synthetic construct
  misc_feature 1..134: note = Description of Artificial Sequence: Synthetic polynucleotide
  source 1..134: mol_type = other RNA
tttggtgactgccacgcccagttttagagctagaaatagcaagttaaaataaggctagtccgttatcaacttgaaaaagtggcaccgagtcggtgcgccagcagtgaacatccgttgggcgtggcagtcatttt

SEQ ID NO: 3416 - RNA, 134 nt, synthetic construct
  misc_feature 1..134: note = Description of Artificial Sequence: Synthetic polynucleotide
  source 1..134: mol_type = other RNA
gtttggtgactgccacgcccagttttagagctagaaatagcaagttaaaataaggctagtccgttatcaacttgaaaaagtggcaccgagtcggtgcagtgaacacccgttgggcgtggcagtcaccttttttt

SEQ ID NO: 3417 - RNA, 134 nt, synthetic construct
  misc_feature 1..134: note = Description of Artificial Sequence: Synthetic polynucleotide
  source 1..134: mol_type = other RNA
gtttggtgactgccacgcccagttttagagctagaaatagcaagttaaaataaggctagtccgttatcaacttgaaaaagtggcaccgagtcggtgcagtgaacaccccttgggcgtggcagtcaccttttttt

SEQ ID NO: 3418 - RNA, 134 nt, synthetic construct
  misc_feature 1..134: note = Description of Artificial Sequence: Synthetic polynucleotide
  source 1..134: mol_type = other RNA
gtttggtgactgccacgcccagttttagagctagaaatagcaagttaaaataaggctagtccgttatcaacttgaaaaagtggcaccgagtcggtgcgtgaacaccccttgggcgtggcagtcaccaatttttt

SEQ ID NO: 3419 - RNA, 134 nt, synthetic construct
  misc_feature 1..134: note = Description of Artificial Sequence: Synthetic polynucleotide
  source 1..134: mol_type = other RNA
gtttggtgactgccacgcccagttttagagctagaaatagcaagttaaaataaggctagtccgttatcaacttgaaaaagtggcaccgagtcggtgcagtgaacacccattgggcgtggcagtcaccttttttt

SEQ ID NO: 3420 - RNA, 134 nt, synthetic construct
  misc_feature 1..134: note = Description of Artificial Sequence: Synthetic polynucleotide
  source 1..134: mol_type = other RNA
tttggtgactgccacgcccagttttagagctagaaatagcaagttaaaataaggctagtccgttatcaacttgaaaaagtggcaccgagtcggtgcgccagcagtgaacaccctttgggcgtggcagtcaccaa

SEQ ID NO: 3421 - RNA, 134 nt, synthetic construct
  misc_feature 1..134: note = Description of Artificial Sequence: Synthetic polynucleotide
  source 1..134: mol_type = other RNA
gtttggtgactgccacgcccagttttagagctagaaatagcaagttaaaataaggctagtccgttatcaacttgaaaaagtggcaccgagtcggtgcgccagcagtgaacacccattgggcgtggcattttttt

SEQ ID NO: 3422 - RNA, 134 nt, synthetic construct
  misc_feature 1..134: note = Description of Artificial Sequence: Synthetic polynucleotide
  source 1..134: mol_type = other RNA
gtttggtgactgccacgcccagttttagagctagaaatagcaagttaaaataaggctagtccgttatcaacttgaaaaagtggcaccgagtcggtgcgcagtgaacaccctttgggcgtggcagtcattttttt

SEQ ID NO: 3423 - RNA, 134 nt, synthetic construct
  misc_feature 1..134: note = Description of Artificial Sequence: Synthetic polynucleotide
  source 1..134: mol_type = other RNA
tttggtgactgccacgcccagttttagagctagaaatagcaagttaaaataaggctagtccgttatcaacttgaaaaagtggcaccgagtcggtgcactgcggaggccagcagtgaacaccctttgggcgtggc

SEQ ID NO: 3424 - RNA, 134 nt, synthetic construct
  misc_feature 1..134: note = Description of Artificial Sequence: Synthetic polynucleotide
  source 1..134: mol_type = other RNA
tttggtgactgccacgcccagttttagagctagaaatagcaagttaaaataaggctagtccgttatcaacttgaaaaagtggcaccgagtcggtgcgcagtgaacatcccttgggcgtggcagtcaccaatttt

SEQ ID NO: 3425 - RNA, 134 nt, synthetic construct
  misc_feature 1..134: note = Description of Artificial Sequence: Synthetic polynucleotide
  source 1..134: mol_type = other RNA
tttggtgactgccacgcccagttttagagctagaaatagcaagttaaaataaggctagtccgttatcaacttgaaaaagtggcaccgagtcggtgcgcggaggccagcagtgaacaccccttgggcgtggcagt

SEQ ID NO: 3426 - RNA, 134 nt, synthetic construct
  misc_feature 1..134: note = Description of Artificial Sequence: Synthetic polynucleotide
  source 1..134: mol_type = other RNA
tttggtgactgccacgcccagttttagagctagaaatagcaagttaaaataaggctagtccgttatcaacttgaaaaagtggcaccgagtcggtgctgcggaggccagcagtgaacacccgttgggcgtggcag

SEQ ID NO: 3427 - RNA, 134 nt, synthetic construct
  misc_feature 1..134: note = Description of Artificial Sequence: Synthetic polynucleotide
  source 1..134: mol_type = other RNA
tttggtgactgccacgcccagttttagagctagaaatagcaagttaaaataaggctagtccgttatcaacttgaaaaagtggcaccgagtcggtgctgcggaggccagcagtgaacacccattgggcgtggcag

SEQ ID NO: 3428 - RNA, 134 nt, synthetic construct
  misc_feature 1..134: note = Description of Artificial Sequence: Synthetic polynucleotide
  source 1..134: mol_type = other RNA
tttggtgactgccacgcccagttttagagctagaaatagcaagttaaaataaggctagtccgttatcaacttgaaaaagtggcaccgagtcggtgcgaggccagcagtgaacacccattgggcgtggcagtcac

SEQ ID NO: 3429 - RNA, 134 nt, synthetic construct
  misc_feature 1..134: note = Description of Artificial Sequence: Synthetic polynucleotide
  source 1..134: mol_type = other RNA
tttggtgactgccacgcccagttttagagctagaaatagcaagttaaaataaggctagtccgttatcaacttgaaaaagtggcaccgagtcggtgcgcggaggccagcagtgaacaccctttgggcgtggcagt

SEQ ID NO: 3430 - RNA, 134 nt, synthetic construct
  misc_feature 1..134: note = Description of Artificial Sequence: Synthetic polynucleotide
  source 1..134: mol_type = other RNA
tttggtgactgccacgcccagttttagagctagaaatagcaagttaaaataaggctagtccgttatcaacttgaaaaagtggcaccgagtcggtgcgccagcagtgaacacccgttgggcgtggcagtcaccaa

SEQ ID NO: 3431 - RNA, 134 nt, synthetic construct
  misc_feature 1..134: note = Description of Artificial Sequence: Synthetic polynucleotide
  source 1..134: mol_type = other RNA
tttggtgactgccacgcccagttttagagctagaaatagcaagttaaaataaggctagtccgttatcaacttgaaaaagtggcaccgagtcggtgcactgcggaggccagcagtgaacacccgttgggcgtggc

SEQ ID NO: 3432 - RNA, 134 nt, synthetic construct
  misc_feature 1..134: note = Description of Artificial Sequence: Synthetic polynucleotide
  source 1..134: mol_type = other RNA
gtttggtgactgccacgcccagttttagagctagaaatagcaagttaaaataaggctagtccgttatcaacttgaaaaagtggcaccgagtcggtgcgtgaacacccgttgggcgtggcagtcaccaatttttt

SEQ ID NO: 3433 - RNA, 134 nt, synthetic construct
  misc_feature 1..134: note = Description of Artificial Sequence: Synthetic polynucleotide
  source 1..134: mol_type = other RNA
gtttggtgactgccacgcccagttttagagctagaaatagcaagttaaaataaggctagtccgttatcaacttgaaaaagtggcaccgagtcggtgcagcagtgaacacccgttgggcgtggcagtcatttttt

SEQ ID NO: 3434 - RNA, 134 nt, synthetic construct
  misc_feature 1..134: note = Description of Artificial Sequence: Synthetic polynucleotide
  source 1..134: mol_type = other RNA
tttggtgactgccacgcccagttttagagctagaaatagcaagttaaaataaggctagtccgttatcaacttgaaaaagtggcaccgagtcggtgcaggccagcagtgaacacccgttgggcgtggcagtcacc

SEQ ID NO: 3435 - RNA, 134 nt, synthetic construct
  misc_feature 1..134: note = Description of Artificial Sequence: Synthetic polynucleotide
  source 1..134: mol_type = other RNA
gtttggtgactgccacgcccagttttagagctagaaatagcaagttaaaataaggctagtccgttatcaacttgaaaaagtggcaccgagtcggtgcggccagcagtgaacacccgttgggcgtggcttttttt

SEQ ID NO: 3436 - RNA, 134 nt, synthetic construct
  misc_feature 1..134: note = Description of Artificial Sequence: Synthetic polynucleotide
  source 1..134: mol_type = other RNA
gtttggtgactgccacgcccagttttagagctagaaatagcaagttaaaataaggctagtccgttatcaacttgaaaaagtggcaccgagtcggtgcggccagcagtgaacaccctttgggcgtggcttttttt

SEQ ID NO: 3437 - RNA, 134 nt, synthetic construct
  misc_feature 1..134: note = Description of Artificial Sequence: Synthetic polynucleotide
  source 1..134: mol_type = other RNA
gtttggtgactgccacgcccagttttagagctagaaatagcaagttaaaataaggctagtccgttatcaacttgaaaaagtggcaccgagtcggtgcgcagtgaacacccgttgggcgtggcagtcattttttt

SEQ ID NO: 3438 - RNA, 134 nt, synthetic construct
  misc_feature 1..134: note = Description of Artificial Sequence: Synthetic polynucleotide
  source 1..134: mol_type = other RNA
tttggtgactgccacgcccagttttagagctagaaatagcaagttaaaataaggctagtccgttatcaacttgaaaaagtggcaccgagtcggtgcgccagcagtgaacatcccttgggcgtggcagtcaccaa

SEQ ID NO: 3439 - RNA, 134 nt, synthetic construct
  misc_feature 1..134: note = Description of Artificial Sequence: Synthetic polynucleotide
  source 1..134: mol_type = other RNA
gtttggtgactgccacgcccagttttagagctagaaatagcaagttaaaataaggctagtccgttatcaacttgaaaaagtggcaccgagtcggtgcagcagtgaacacccattgggcgtggcagtcttttttt

SEQ ID NO: 3440 - RNA, 134 nt, synthetic construct
  misc_feature 1..134: note = Description of Artificial Sequence: Synthetic polynucleotide
  source 1..134: mol_type = other RNA
gtttggtgactgccacgcccagttttagagctagaaatagcaagttaaaataaggctagtccgttatcaacttgaaaaagtggcaccgagtcggtgcagcagtgaacaccccttgggcgtggcagtcatttttt

SEQ ID NO: 3441 - RNA, 134 nt, synthetic construct
  misc_feature 1..134: note = Description of Artificial Sequence: Synthetic polynucleotide
  source 1..134: mol_type = other RNA
tttggtgactgccacgcccagttttagagctagaaatagcaagttaaaataaggctagtccgttatcaacttgaaaaagtggcaccgagtcggtgcgccagcagtgaacaccccttgggcgtggcagtcaccaa

SEQ ID NO: 3442 - RNA, 134 nt, synthetic construct
  misc_feature 1..134: note = Description of Artificial Sequence: Synthetic polynucleotide
  source 1..134: mol_type = other RNA
tttggtgactgccacgcccagttttagagctagaaatagcaagttaaaataaggctagtccgttatcaacttgaaaaagtggcaccgagtcggtgcgccagcagtgaacacccattgggcgtggcagtcaccaa

SEQ ID NO: 3443 - RNA, 134 nt, synthetic construct
  misc_feature 1..134: note = Description of Artificial Sequence: Synthetic polynucleotide
  source 1..134: mol_type = other RNA
tttggtgactgccacgcccagttttagagctagaaatagcaagttaaaataaggctagtccgttatcaacttgaaaaagtggcaccgagtcggtgcgcagtgaacatccgttgggcgtggcagtcaccaatttt

SEQ ID NO: 3444 - RNA, 134 nt, synthetic construct
  misc_feature 1..134: note = Description of Artificial Sequence: Synthetic polynucleotide
  source 1..134: mol_type = other RNA
gtttggtgactgccacgcccagttttagagctagaaatagcaagttaaaataaggctagtccgttatcaacttgaaaaagtggcaccgagtcggtgcgcagtgaacacccattgggcgtggcagtcattttttt

SEQ ID NO: 3445 - RNA, 134 nt, synthetic construct
  misc_feature 1..134: note = Description of Artificial Sequence: Synthetic polynucleotide
  source 1..134: mol_type = other RNA
gtttggtgactgccacgcccagttttagagctagaaatagcaagttaaaataaggctagtccgttatcaacttgaaaaagtggcaccgagtcggtgcgcagtgaacaccccttgggcgtggcagtcattttttt

SEQ ID NO: 3446 - RNA, 134 nt, synthetic construct
  misc_feature 1..134: note = Description of Artificial Sequence: Synthetic polynucleotide
  source 1..134: mol_type = other RNA
tttggtgactgccacgcccagttttagagctagaaatagcaagttaaaataaggctagtccgttatcaacttgaaaaagtggcaccgagtcggtgcggaggccagcagtgaacacccattgggcgtggcagtca

SEQ ID NO: 3447 - RNA, 134 nt, synthetic construct
  misc_feature 1..134: note = Description of Artificial Sequence: Synthetic polynucleotide
  source 1..134: mol_type = other RNA
gtttggtgactgccacgcccagttttagagctagaaatagcaagttaaaataaggctagtccgttatcaacttgaaaaagtggcaccgagtcggtgcagcagtgaacaccctttgggcgtggcagtcttttttt

SEQ ID NO: 3448 - RNA, 134 nt, synthetic construct
  misc_feature 1..134: note = Description of Artificial Sequence: Synthetic polynucleotide
  source 1..134: mol_type = other RNA
gtttggtgactgccacgcccagttttagagctagaaatagcaagttaaaataaggctagtccgttatcaacttgaaaaagtggcaccgagtcggtgcagcagtgaacacccattgggcgtggcagtcatttttt

SEQ ID NO: 3449 - RNA, 134 nt, synthetic construct
  misc_feature 1..134: note = Description of Artificial Sequence: Synthetic polynucleotide
  source 1..134: mol_type = other RNA
tttggtgactgccacgcccagttttagagctagaaatagcaagttaaaataaggctagtccgttatcaacttgaaaaagtggcaccgagtcggtgctgcggaggccagcagtgaacaccctttgggcgtggcag

SEQ ID NO: 3450 - RNA, 134 nt, synthetic construct
  misc_feature 1..134: note = Description of Artificial Sequence: Synthetic polynucleotide
  source 1..134: mol_type = other RNA
tttggtgactgccacgcccagttttagagctagaaatagcaagttaaaataaggctagtccgttatcaacttgaaaaagtggcaccgagtcggtgcactgcggaggccagcagtgaacacccattgggcgtggc

SEQ ID NO: 3451 - RNA, 134 nt, synthetic construct
  misc_feature 1..134: note = Description of Artificial Sequence: Synthetic polynucleotide
  source 1..134: mol_type = other RNA
tttggtgactgccacgcccagttttagagctagaaatagcaagttaaaataaggctagtccgttatcaacttgaaaaagtggcaccgagtcggtgcaggccagcagtgaacaccctttgggcgtggcagtcacc

SEQ ID NO: 3452 - RNA, 134 nt, synthetic construct
  misc_feature 1..134: note = Description of Artificial Sequence: Synthetic polynucleotide
  source 1..134: mol_type = other RNA
tttggtgactgccacgcccagttttagagctagaaatagcaagttaaaataaggctagtccgttatcaacttgaaaaagtggcaccgagtcggtgcactgcggaggccagcagtgaacaccccttgggcgtggc

SEQ ID NO: 3453 - RNA, 134 nt, synthetic construct
  misc_feature 1..134: note = Description of Artificial Sequence: Synthetic polynucleotide
  source 1..134: mol_type = other RNA
tttggtgactgccacgcccagttttagagctagaaatagcaagttaaaataaggctagtccgttatcaacttgaaaaagtggcaccgagtcggtgcgaggccagcagtgaacaccccttgggcgtggcagtcac

SEQ ID NO: 3454 - RNA, 134 nt, synthetic construct
  misc_feature 1..134: note = Description of Artificial Sequence: Synthetic polynucleotide
  source 1..134: mol_type = other RNA
tttggtgactgccacgcccagttttagagctagaaatagcaagttaaaataaggctagtccgttatcaacttgaaaaagtggcaccgagtcggtgctgcggaggccagcagtgaacaccccttgggcgtggcag

SEQ ID NO: 3455 - RNA, 134 nt, synthetic construct
  misc_feature 1..134: note = Description of Artificial Sequence: Synthetic polynucleotide
  source 1..134: mol_type = other RNA
tttggtgactgccacgcccagttttagagctagaaatagcaagttaaaataaggctagtccgttatcaacttgaaaaagtggcaccgagtcggtgcggaggccagcagtgaacaccccttgggcgtggcagtca

SEQ ID NO: 3456 - RNA, 135 nt, synthetic construct
  misc_feature 1..135: note = Description of Artificial Sequence: Synthetic polynucleotide
  source 1..135: mol_type = other RNA
gtttggtgactgccacgcccagttttagagctagaaatagcaagttaaaataaggctagtccgttatcaacttgaaaaagtggcaccgagtcggtgcgcagtgaacacccattgggcgtggcagtcacttttttt

SEQ ID NO: 3457 - RNA, 135 nt, synthetic construct
  misc_feature 1..135: note = Description of Artificial Sequence: Synthetic polynucleotide
  source 1..135: mol_type = other RNA
gtttggtgactgccacgcccagttttagagctagaaatagcaagttaaaataaggctagtccgttatcaacttgaaaaagtggcaccgagtcggtgcgcagtgaacacccattgggcgtggcagtcacctttttt

SEQ ID NO: 3458 - RNA, 135 nt, synthetic construct
  misc_feature 1..135: note = Description of Artificial Sequence: Synthetic polynucleotide
  source 1..135: mol_type = other RNA
gtttggtgactgccacgcccagttttagagctagaaatagcaagttaaaataaggctagtccgttatcaacttgaaaaagtggcaccgagtcggtgcagtgaacacccgttgggcgtggcagtcaccaatttttt

SEQ ID NO: 3459 - RNA, 135 nt, synthetic construct
  misc_feature 1..135: note = Description of Artificial Sequence: Synthetic polynucleotide
  source 1..135: mol_type = other RNA
gtttggtgactgccacgcccagttttagagctagaaatagcaagttaaaataaggctagtccgttatcaacttgaaaaagtggcaccgagtcggtgcaggccagcagtgaacaccctttgggcgtggcttttttt

SEQ ID NO: 3460 - RNA, 135 nt, synthetic construct
  misc_feature 1..135: note = Description of Artificial Sequence: Synthetic polynucleotide
  source 1..135: mol_type = other RNA
gtttggtgactgccacgcccagttttagagctagaaatagcaagttaaaataaggctagtccgttatcaacttgaaaaagtggcaccgagtcggtgcagcagtgaacaccccttgggcgtggcagtcattttttt

SEQ ID NO: 3461 - RNA, 135 nt, synthetic construct
  misc_feature 1..135: note = Description of Artificial Sequence: Synthetic polynucleotide
  source 1..135: mol_type = other RNA
gtttggtgactgccacgcccagttttagagctagaaatagcaagttaaaataaggctagtccgttatcaacttgaaaaagtggcaccgagtcggtgcagtgaacaccccttgggcgtggcagtcaccaatttttt

SEQ ID NO: 3462 - RNA, 135 nt, synthetic construct
  misc_feature 1..135: note = Description of Artificial Sequence: Synthetic polynucleotide
  source 1..135: mol_type = other RNA
gtttggtgactgccacgcccagttttagagctagaaatagcaagttaaaataaggctagtccgttatcaacttgaaaaagtggcaccgagtcggtgcggccagcagtgaacacccattgggcgtggcattttttt

SEQ ID NO: 3463 - RNA, 135 nt, synthetic construct
  misc_feature 1..135: note = Description of Artificial Sequence: Synthetic polynucleotide
  source 1..135: mol_type = other RNA
tttggtgactgccacgcccagttttagagctagaaatagcaagttaaaataaggctagtccgttatcaacttgaaaaagtggcaccgagtcggtgcactgcggaggccagcagtgaacaccccttgggcgtggca

SEQ ID NO: 3464 - RNA, 135 nt, synthetic construct
  misc_feature 1..135: note = Description of Artificial Sequence: Synthetic polynucleotide
  source 1..135: mol_type = other RNA
gtttggtgactgccacgcccagttttagagctagaaatagcaagttaaaataaggctagtccgttatcaacttgaaaaagtggcaccgagtcggtgcaggccagcagtgaacaccccttgggcgtggcttttttt

SEQ ID NO: 3465 - RNA, 135 nt, synthetic construct
  misc_feature 1..135: note = Description of Artificial Sequence: Synthetic polynucleotide
  source 1..135: mol_type = other RNA
gtttggtgactgccacgcccagttttagagctagaaatagcaagttaaaataaggctagtccgttatcaacttgaaaaagtggcaccgagtcggtgcgcagtgaacacccgttgggcgtggcagtcacctttttt

SEQ ID NO: 3466 - RNA, 135 nt, synthetic construct
  misc_feature 1..135: note = Description of Artificial Sequence: Synthetic polynucleotide
  source 1..135: mol_type = other RNA
tttggtgactgccacgcccagttttagagctagaaatagcaagttaaaataaggctagtccgttatcaacttgaaaaagtggcaccgagtcggtgctgcggaggccagcagtgaacaccccttgggcgtggcagt

SEQ ID NO: 3467 - RNA, 135 nt, synthetic construct
  misc_feature 1..135: note = Description of Artificial Sequence: Synthetic polynucleotide
  source 1..135: mol_type = other RNA
gtttggtgactgccacgcccagttttagagctagaaatagcaagttaaaataaggctagtccgttatcaacttgaaaaagtggcaccgagtcggtgcagcagtgaacacccgttgggcgtggcagtcattttttt

SEQ ID NO: 3468 - RNA, 135 nt, synthetic construct
  misc_feature 1..135: note = Description of Artificial Sequence: Synthetic polynucleotide
  source 1..135: mol_type = other RNA
gtttggtgactgccacgcccagttttagagctagaaatagcaagttaaaataaggctagtccgttatcaacttgaaaaagtggcaccgagtcggtgcgcagtgaacaccccttgggcgtggcagtcacttttttt

SEQ ID NO: 3469 - RNA, 135 nt, synthetic construct
  misc_feature 1..135: note = Description of Artificial Sequence: Synthetic polynucleotide
  source 1..135: mol_type = other RNA
tttggtgactgccacgcccagttttagagctagaaatagcaagttaaaataaggctagtccgttatcaacttgaaaaagtggcaccgagtcggtgcgactgcggaggccagcagtgaacacccgttgggcgtggc

SEQ ID NO: 3470 - RNA, 135 nt, synthetic construct
  misc_feature 1..135: note = Description of Artificial Sequence: Synthetic polynucleotide
  source 1..135: mol_type = other RNA
tttggtgactgccacgcccagttttagagctagaaatagcaagttaaaataaggctagtccgttatcaacttgaaaaagtggcaccgagtcggtgcggaggccagcagtgaacaccctttgggcgtggcagtcac

SEQ ID NO: 3471 - RNA, 135 nt, synthetic construct
  misc_feature 1..135: note = Description of Artificial Sequence: Synthetic polynucleotide
  source 1..135: mol_type = other RNA
tttggtgactgccacgcccagttttagagctagaaatagcaagttaaaataaggctagtccgttatcaacttgaaaaagtggcaccgagtcggtgcggaggccagcagtgaacaccccttgggcgtggcagtcac

SEQ ID NO: 3472 - RNA, 135 nt, synthetic construct
  misc_feature 1..135: note = Description of Artificial Sequence: Synthetic polynucleotide
  source 1..135: mol_type = other RNA
tttggtgactgccacgcccagttttagagctagaaatagcaagttaaaataaggctagtccgttatcaacttgaaaaagtggcaccgagtcggtgctgcggaggccagcagtgaacacccattgggcgtggcagt

SEQ ID NO: 3473 - RNA, 135 nt, synthetic construct
  misc_feature 1..135: note = Description of Artificial Sequence: Synthetic polynucleotide
  source 1..135: mol_type = other RNA
tttggtgactgccacgcccagttttagagctagaaatagcaagttaaaataaggctagtccgttatcaacttgaaaaagtggcaccgagtcggtgcgactgcggaggccagcagtgaacaccccttgggcgtggc

SEQ ID NO: 3474 - RNA, 135 nt, synthetic construct
  misc_feature 1..135: note = Description of Artificial Sequence: Synthetic polynucleotide
  source 1..135: mol_type = other RNA
tttggtgactgccacgcccagttttagagctagaaatagcaagttaaaataaggctagtccgttatcaacttgaaaaagtggcaccgagtcggtgcgcggaggccagcagtgaacacccgttgggcgtggcagtc

SEQ ID NO: 3475 - RNA, 135 nt, synthetic construct
  misc_feature 1..135: note = Description of Artificial Sequence: Synthetic polynucleotide
  source 1..135: mol_type = other RNA
gtttggtgactgccacgcccagttttagagctagaaatagcaagttaaaataaggctagtccgttatcaacttgaaaaagtggcaccgagtcggtgcagcagtgaacaccctttgggcgtggcagtcattttttt

SEQ ID NO: 3476 - RNA, 135 nt, synthetic construct
  misc_feature 1..135: note = Description of Artificial Sequence: Synthetic polynucleotide
  source 1..135: mol_type = other RNA
tttggtgactgccacgcccagttttagagctagaaatagcaagttaaaataaggctagtccgttatcaacttgaaaaagtggcaccgagtcggtgcagcagtgaacatcccttgggcgtggcagtcaccaatttt

SEQ ID NO: 3477 - RNA, 135 nt, synthetic construct
  misc_feature 1..135: note = Description of Artificial Sequence: Synthetic polynucleotide
  source 1..135: mol_type = other RNA
tttggtgactgccacgcccagttttagagctagaaatagcaagttaaaataaggctagtccgttatcaacttgaaaaagtggcaccgagtcggtgcactgcggaggccagcagtgaacacccattgggcgtggca

SEQ ID NO: 3478 - RNA, 135 nt, synthetic construct
  misc_feature 1..135: note = Description of Artificial Sequence: Synthetic polynucleotide
  source 1..135: mol_type = other RNA
tttggtgactgccacgcccagttttagagctagaaatagcaagttaaaataaggctagtccgttatcaacttgaaaaagtggcaccgagtcggtgcggaggccagcagtgaacacccgttgggcgtggcagtcac

SEQ ID NO: 3479 - RNA, 135 nt, synthetic construct
  misc_feature 1..135: note = Description of Artificial Sequence: Synthetic polynucleotide
  source 1..135: mol_type = other RNA
gtttggtgactgccacgcccagttttagagctagaaatagcaagttaaaataaggctagtccgttatcaacttgaaaaagtggcaccgagtcggtgcgcagtgaacaccctttgggcgtggcagtcacttttttt

SEQ ID NO: 3480 - RNA, 135 nt, synthetic construct
  misc_feature 1..135: note = Description of Artificial Sequence: Synthetic polynucleotide
  source 1..135: mol_type = other RNA
tttggtgactgccacgcccagttttagagctagaaatagcaagttaaaataaggctagtccgttatcaacttgaaaaagtggcaccgagtcggtgcgactgcggaggccagcagtgaacacccattgggcgtggc

SEQ ID NO: 3481 - RNA, 135 nt, synthetic construct
  misc_feature 1..135: note = Description of Artificial Sequence: Synthetic polynucleotide
  source 1..135: mol_type = other RNA
tttggtgactgccacgcccagttttagagctagaaatagcaagttaaaataaggctagtccgttatcaacttgaaaaagtggcaccgagtcggtgcgaggccagcagtgaacacccgttgggcgtggcagtcacc

SEQ ID NO: 3482 - RNA, 135 nt, synthetic construct
  misc_feature 1..135: note = Description of Artificial Sequence: Synthetic polynucleotide
  source 1..135: mol_type = other RNA
tttggtgactgccacgcccagttttagagctagaaatagcaagttaaaataaggctagtccgttatcaacttgaaaaagtggcaccgagtcggtgcactgcggaggccagcagtgaacaccctttgggcgtggca

SEQ ID NO: 3483 - RNA, 135 nt, synthetic construct
  misc_feature 1..135: note = Description of Artificial Sequence: Synthetic polynucleotide
  source 1..135: mol_type = other RNA
gtttggtgactgccacgcccagttttagagctagaaatagcaagttaaaataaggctagtccgttatcaacttgaaaaagtggcaccgagtcggtgcagtgaacaccctttgggcgtggcagtcaccaatttttt

SEQ ID NO: 3484 - RNA, 135 nt, synthetic construct
  misc_feature 1..135: note = Description of Artificial Sequence: Synthetic polynucleotide
  source 1..135: mol_type = other RNA
gtttggtgactgccacgcccagttttagagctagaaatagcaagttaaaataaggctagtccgttatcaacttgaaaaagtggcaccgagtcggtgcaggccagcagtgaacacccgttgggcgtggcttttttt

SEQ ID NO: 3485 - RNA, 135 nt, synthetic construct
  misc_feature 1..135: note = Description of Artificial Sequence: Synthetic polynucleotide
  source 1..135: mol_type = other RNA
gtttggtgactgccacgcccagttttagagctagaaatagcaagttaaaataaggctagtccgttatcaacttgaaaaagtggcaccgagtcggtgcgccagcagtgaacacccattgggcgtggcagttttttt

SEQ ID NO: 3486 - RNA, 135 nt, synthetic construct
  misc_feature 1..135: note = Description of Artificial Sequence: Synthetic polynucleotide
  source 1..135: mol_type = other RNA
gtttggtgactgccacgcccagttttagagctagaaatagcaagttaaaataaggctagtccgttatcaacttgaaaaagtggcaccgagtcggtgcgcagtgaacacccgttgggcgtggcagtcacttttttt

SEQ ID NO: 3487 - RNA, 135 nt, synthetic construct
  misc_feature 1..135: note = Description of Artificial Sequence: Synthetic polynucleotide
  source 1..135: mol_type = other RNA
tttggtgactgccacgcccagttttagagctagaaatagcaagttaaaataaggctagtccgttatcaacttgaaaaagtggcaccgagtcggtgcggaggccagcagtgaacacccattgggcgtggcagtcac

SEQ ID NO: 3488 - RNA, 135 nt, synthetic construct
  misc_feature 1..135: note = Description of Artificial Sequence: Synthetic polynucleotide
  source 1..135: mol_type = other RNA
gtttggtgactgccacgcccagttttagagctagaaatagcaagttaaaataaggctagtccgttatcaacttgaaaaagtggcaccgagtcggtgcagcagtgaacacccattgggcgtggcagtcattttttt

SEQ ID NO: 3489 - RNA, 135 nt, synthetic construct
  misc_feature 1..135: note = Description of Artificial Sequence: Synthetic polynucleotide
  source 1..135: mol_type = other RNA
gtttggtgactgccacgcccagttttagagctagaaatagcaagttaaaataaggctagtccgttatcaacttgaaaaagtggcaccgagtcggtgcggccagcagtgaacaccccttgggcgtggcattttttt

SEQ ID NO: 3490 - RNA, 135 nt, synthetic construct
  misc_feature 1..135: note = Description of Artificial Sequence: Synthetic polynucleotide
  source 1..135: mol_type = other RNA
tttggtgactgccacgcccagttttagagctagaaatagcaagttaaaataaggctagtccgttatcaacttgaaaaagtggcaccgagtcggtgcgcggaggccagcagtgaacaccctttgggcgtggcagtc

SEQ ID NO: 3491 - RNA, 135 nt, synthetic construct
  misc_feature 1..135: note = Description of Artificial Sequence: Synthetic polynucleotide
  source 1..135: mol_type = other RNA
gtttggtgactgccacgcccagttttagagctagaaatagcaagttaaaataaggctagtccgttatcaacttgaaaaagtggcaccgagtcggtgcgccagcagtgaacaccctttgggcgtggcagttttttt

SEQ ID NO: 3492 - RNA, 135 nt, synthetic construct
  misc_feature 1..135: note = Description of Artificial Sequence: Synthetic polynucleotide
  source 1..135: mol_type = other RNA
gtttggtgactgccacgcccagttttagagctagaaatagcaagttaaaataaggctagtccgttatcaacttgaaaaagtggcaccgagtcggtgcggccagcagtgaacaccctttgggcgtggcattttttt

SEQ ID NO: 3493 - RNA, 135 nt, synthetic construct
  misc_feature 1..135: note = Description of Artificial Sequence: Synthetic polynucleotide
  source 1..135: mol_type = other RNA
gtttggtgactgccacgcccagttttagagctagaaatagcaagttaaaataaggctagtccgttatcaacttgaaaaagtggcaccgagtcggtgcaggccagcagtgaacacccattgggcgtggcttttttt

SEQ ID NO: 3494 - RNA, 135 nt, synthetic construct
  misc_feature 1..135: note = Description of Artificial Sequence: Synthetic polynucleotide
  source 1..135: mol_type = other RNA
tttggtgactgccacgcccagttttagagctagaaatagcaagttaaaataaggctagtccgttatcaacttgaaaaagtggcaccgagtcggtgctgcggaggccagcagtgaacaccctttgggcgtggcagt

SEQ ID NO: 3495 - RNA, 135 nt, synthetic construct
  misc_feature 1..135: note = Description of Artificial Sequence: Synthetic polynucleotide
  source 1..135: mol_type = other RNA
gtttggtgactgccacgcccagttttagagctagaaatagcaagttaaaataaggctagtccgttatcaacttgaaaaagtggcaccgagtcggtgcgcagtgaacaccctttgggcgtggcagtcacctttttt

SEQ ID NO: 3496 - RNA, 135 nt, synthetic construct
  misc_feature 1..135: note = Description of Artificial Sequence: Synthetic polynucleotide
  source 1..135: mol_type = other RNA
gtttggtgactgccacgcccagttttagagctagaaatagcaagttaaaataaggctagtccgttatcaacttgaaaaagtggcaccgagtcggtgcggccagcagtgaacacccgttgggcgtggcattttttt

SEQ ID NO: 3497 - RNA, 135 nt, synthetic construct
  misc_feature 1..135: note = Description of Artificial Sequence: Synthetic polynucleotide
  source 1..135: mol_type = other RNA
gtttggtgactgccacgcccagttttagagctagaaatagcaagttaaaataaggctagtccgttatcaacttgaaaaagtggcaccgagtcggtgcgccagcagtgaacaccccttgggcgtggcagttttttt

SEQ ID NO: 3498 - RNA, 135 nt, synthetic construct
  misc_feature 1..135: note = Description of Artificial Sequence: Synthetic polynucleotide
  source 1..135: mol_type = other RNA
tttggtgactgccacgcccagttttagagctagaaatagcaagttaaaataaggctagtccgttatcaacttgaaaaagtggcaccgagtcggtgcgactgcggaggccagcagtgaacaccctttgggcgtggc

SEQ ID NO: 3499 - RNA, 135 nt, synthetic construct
  misc_feature 1..135: note = Description of Artificial Sequence: Synthetic polynucleotide
  source 1..135: mol_type = other RNA
tttggtgactgccacgcccagttttagagctagaaatagcaagttaaaataaggctagtccgttatcaacttgaaaaagtggcaccgagtcggtgcactgcggaggccagcagtgaacacccgttgggcgtggca

SEQ ID NO: 3500 - RNA, 135 nt, synthetic construct
  misc_feature 1..135: note = Description of Artificial Sequence: Synthetic polynucleotide
  source 1..135: mol_type = other RNA
gtttggtgactgccacgcccagttttagagctagaaatagcaagttaaaataaggctagtccgttatcaacttgaaaaagtggcaccgagtcggtgcgccagcagtgaacacccgttgggcgtggcagttttttt

SEQ ID NO: 3501 - RNA, 135 nt, synthetic construct
  misc_feature 1..135: note = Description of Artificial Sequence: Synthetic polynucleotide
  source 1..135: mol_type = other RNA
tttggtgactgccacgcccagttttagagctagaaatagcaagttaaaataaggctagtccgttatcaacttgaaaaagtggcaccgagtcggtgcagcagtgaacatccgttgggcgtggcagtcaccaatttt

SEQ ID NO: 3502 - RNA, 135 nt, synthetic construct
  misc_feature 1..135: note = Description of Artificial Sequence: Synthetic polynucleotide
  source 1..135: mol_type = other RNA
tttggtgactgccacgcccagttttagagctagaaatagcaagttaaaataaggctagtccgttatcaacttgaaaaagtggcaccgagtcggtgcgcggaggccagcagtgaacacccattgggcgtggcagtc

SEQ ID NO: 3503 - RNA, 135 nt, synthetic construct
  misc_feature 1..135: note = Description of Artificial Sequence: Synthetic polynucleotide
  source 1..135: mol_type = other RNA
tttggtgactgccacgcccagttttagagctagaaatagcaagttaaaataaggctagtccgttatcaacttgaaaaagtggcaccgagtcggtgcgcggaggccagcagtgaacaccccttgggcgtggcagtc

SEQ ID NO: 3504 - RNA, 135 nt, synthetic construct
  misc_feature 1..135: note = Description of Artificial Sequence: Synthetic polynucleotide
  source 1..135: mol_type = other RNA
gtttggtgactgccacgcccagttttagagctagaaatagcaagttaaaataaggctagtccgttatcaacttgaaaaagtggcaccgagtcggtgcgcagtgaacaccccttgggcgtggcagtcacctttttt

SEQ ID NO: 3505 - RNA, 135 nt, synthetic construct
  misc_feature 1..135: note = Description of Artificial Sequence: Synthetic polynucleotide
  source 1..135: mol_type = other RNA
tttggtgactgccacgcccagttttagagctagaaatagcaagttaaaataaggctagtccgttatcaacttgaaaaagtggcaccgagtcggtgcgaggccagcagtgaacaccccttgggcgtggcagtcacc

SEQ ID NO: 3506 - RNA, 135 nt, synthetic construct
  misc_feature 1..135: note = Description of Artificial Sequence: Synthetic polynucleotide
  source 1..135: mol_type = other RNA
tttggtgactgccacgcccagttttagagctagaaatagcaagttaaaataaggctagtccgttatcaacttgaaaaagtggcaccgagtcggtgcgaggccagcagtgaacacccattgggcgtggcagtcacc

SEQ ID NO: 3507 - RNA, 135 nt, synthetic construct
  misc_feature 1..135: note = Description of Artificial Sequence: Synthetic polynucleotide
  source 1..135: mol_type = other RNA
gtttggtgactgccacgcccagttttagagctagaaatagcaagttaaaataaggctagtccgttatcaacttgaaaaagtggcaccgagtcggtgcagtgaacacccattgggcgtggcagtcaccaatttttt

SEQ ID NO: 3508 - RNA, 135 nt, synthetic construct
  misc_feature 1..135: note = Description of Artificial Sequence: Synthetic polynucleotide
  source 1..135: mol_type = other RNA
tttggtgactgccacgcccagttttagagctagaaatagcaagttaaaataaggctagtccgttatcaacttgaaaaagtggcaccgagtcggtgctgcggaggccagcagtgaacacccgttgggcgtggcagt

SEQ ID NO: 3509 - RNA, 135 nt, synthetic construct
  misc_feature 1..135: note = Description of Artificial Sequence: Synthetic polynucleotide
  source 1..135: mol_type = other RNA
tttggtgactgccacgcccagttttagagctagaaatagcaagttaaaataaggctagtccgttatcaacttgaaaaagtggcaccgagtcggtgcgaggccagcagtgaacaccctttgggcgtggcagtcacc

SEQ ID NO: 3510 - RNA, 136 nt, synthetic construct
  misc_feature 1..136: note = Description of Artificial Sequence: Synthetic polynucleotide
  source 1..136: mol_type = other RNA
tttggtgactgccacgcccagttttagagctagaaatagcaagttaaaataaggctagtccgttatcaacttgaaaaagtggcaccgagtcggtgcgcggaggccagcagtgaacaccctttgggcgtggcagtca

SEQ ID NO: 3511 - RNA, 136 nt, synthetic construct
  misc_feature 1..136: note = Description of Artificial Sequence: Synthetic polynucleotide
  source 1..136: mol_type = other RNA
tttggtgactgccacgcccagttttagagctagaaatagcaagttaaaataaggctagtccgttatcaacttgaaaaagtggcaccgagtcggtgcgcggaggccagcagtgaacaccccttgggcgtggcagtca

SEQ ID NO: 3512 - RNA, 136 nt, synthetic construct
  misc_feature 1..136: note = Description of Artificial Sequence: Synthetic polynucleotide
  source 1..136: mol_type = other RNA
gtttggtgactgccacgcccagttttagagctagaaatagcaagttaaaataaggctagtccgttatcaacttgaaaaagtggcaccgagtcggtgcagcagtgaacaccccttgggcgtggcagtcacttttttt

SEQ ID NO: 3513 - RNA, 136 nt, synthetic construct
  misc_feature 1..136: note = Description of Artificial Sequence: Synthetic polynucleotide
  source 1..136: mol_type = other RNA
tttggtgactgccacgcccagttttagagctagaaatagcaagttaaaataaggctagtccgttatcaacttgaaaaagtggcaccgagtcggtgcggaggccagcagtgaacacccattgggcgtggcagtcacc

SEQ ID NO: 3514 - RNA, 136 nt, synthetic construct
  misc_feature 1..136: note = Description of Artificial Sequence: Synthetic polynucleotide
  source 1..136: mol_type = other RNA
gtttggtgactgccacgcccagttttagagctagaaatagcaagttaaaataaggctagtccgttatcaacttgaaaaagtggcaccgagtcggtgcggccagcagtgaacaccccttgggcgtggcagttttttt

SEQ ID NO: 3515 - RNA, 136 nt, synthetic construct
  misc_feature 1..136: note = Description of Artificial Sequence: Synthetic polynucleotide
  source 1..136: mol_type = other RNA
gtttggtgactgccacgcccagttttagagctagaaatagcaagttaaaataaggctagtccgttatcaacttgaaaaagtggcaccgagtcggtgcggccagcagtgaacacccgttgggcgtggcagttttttt

SEQ ID NO: 3516 - RNA, 136 nt, synthetic construct
  misc_feature 1..136: note = Description of Artificial Sequence: Synthetic polynucleotide
  source 1..136: mol_type = other RNA
gtttggtgactgccacgcccagttttagagctagaaatagcaagttaaaataaggctagtccgttatcaacttgaaaaagtggcaccgagtcggtgcaggccagcagtgaacaccccttgggcgtggcattttttt

SEQ ID NO: 3517 - RNA, 136 nt, synthetic construct
  misc_feature 1..136: note = Description of Artificial Sequence: Synthetic polynucleotide
  source 1..136: mol_type = other RNA
gtttggtgactgccacgcccagttttagagctagaaatagcaagttaaaataaggctagtccgttatcaacttgaaaaagtggcaccgagtcggtgcagcagtgaacacccgttgggcgtggcagtcacctttttt

SEQ ID NO: 3518 - RNA, 136 nt, synthetic construct
  misc_feature 1..136: note = Description of Artificial Sequence: Synthetic polynucleotide
  source 1..136: mol_type = other RNA
gtttggtgactgccacgcccagttttagagctagaaatagcaagttaaaataaggctagtccgttatcaacttgaaaaagtggcaccgagtcggtgcggccagcagtgaacaccctttgggcgtggcagttttttt

SEQ ID NO: 3519 - RNA, 136 nt, synthetic construct
  misc_feature 1..136: note = Description of Artificial Sequence: Synthetic polynucleotide
  source 1..136: mol_type = other RNA
gtttggtgactgccacgcccagttttagagctagaaatagcaagttaaaataaggctagtccgttatcaacttgaaaaagtggcaccgagtcggtgcgcagtgaacacccattgggcgtggcagtcaccttttttt

SEQ ID NO: 3520 - RNA, 136 nt, synthetic construct
  misc_feature 1..136: note = Description of Artificial Sequence: Synthetic polynucleotide
  source 1..136: mol_type = other RNA
tttggtgactgccacgcccagttttagagctagaaatagcaagttaaaataaggctagtccgttatcaacttgaaaaagtggcaccgagtcggtgcggactgcggaggccagcagtgaacacccgttgggcgtggc

SEQ ID NO: 3521 - RNA, 136 nt, synthetic construct
  misc_feature 1..136: note = Description of Artificial Sequence: Synthetic polynucleotide
  source 1..136: mol_type = other RNA
gtttggtgactgccacgcccagttttagagctagaaatagcaagttaaaataaggctagtccgttatcaacttgaaaaagtggcaccgagtcggtgcagcagtgaacaccccttgggcgtggcagtcacctttttt

SEQ ID NO: 3522 - RNA, 136 nt, synthetic construct
  misc_feature 1..136: note = Description of Artificial Sequence: Synthetic polynucleotide
  source 1..136: mol_type = other RNA
tttggtgactgccacgcccagttttagagctagaaatagcaagttaaaataaggctagtccgttatcaacttgaaaaagtggcaccgagtcggtgcgactgcggaggccagcagtgaacacccattgggcgtggca

SEQ ID NO: 3523 - RNA, 136 nt, synthetic construct
  misc_feature 1..136: note = Description of Artificial Sequence: Synthetic polynucleotide
  source 1..136: mol_type = other RNA
tttggtgactgccacgcccagttttagagctagaaatagcaagttaaaataaggctagtccgttatcaacttgaaaaagtggcaccgagtcggtgcgactgcggaggccagcagtgaacacccgttgggcgtggca

SEQ ID NO: 3524 - RNA, 136 nt, synthetic construct
  misc_feature 1..136: note = Description of Artificial Sequence: Synthetic polynucleotide
  source 1..136: mol_type = other RNA
gtttggtgactgccacgcccagttttagagctagaaatagcaagttaaaataaggctagtccgttatcaacttgaaaaagtggcaccgagtcggtgcaggccagcagtgaacaccctttgggcgtggcattttttt

SEQ ID NO: 3525 - RNA, 136 nt, synthetic construct
  misc_feature 1..136: note = Description of Artificial Sequence: Synthetic polynucleotide
  source 1..136: mol_type = other RNA
gtttggtgactgccacgcccagttttagagctagaaatagcaagttaaaataaggctagtccgttatcaacttgaaaaagtggcaccgagtcggtgcagcagtgaacaccctttgggcgtggcagtcacttttttt

SEQ ID NO: 3526 - RNA, 136 nt, synthetic construct
  misc_feature 1..136: note = Description of Artificial Sequence: Synthetic polynucleotide
  source 1..136: mol_type = other RNA
tttggtgactgccacgcccagttttagagctagaaatagcaagttaaaataaggctagtccgttatcaacttgaaaaagtggcaccgagtcggtgcggaggccagcagtgaacaccccttgggcgtggcagtcacc

SEQ ID NO: 3527 - RNA, 136 nt, synthetic construct
  misc_feature 1..136: note = Description of Artificial Sequence: Synthetic polynucleotide
  source 1..136: mol_type = other RNA
gtttggtgactgccacgcccagttttagagctagaaatagcaagttaaaataaggctagtccgttatcaacttgaaaaagtggcaccgagtcggtgcgcagtgaacaccctttgggcgtggcagtcaccttttttt

SEQ ID NO: 3528 - RNA, 136 nt, synthetic construct
  misc_feature 1..136: note = Description of Artificial Sequence: Synthetic polynucleotide
  source 1..136: mol_type = other RNA
gtttggtgactgccacgcccagttttagagctagaaatagcaagttaaaataaggctagtccgttatcaacttgaaaaagtggcaccgagtcggtgcgaggccagcagtgaacaccctttgggcgtggcttttttt

SEQ ID NO: 3529 - RNA, 136 nt, synthetic construct
  misc_feature 1..136: note = Description of Artificial Sequence: Synthetic polynucleotide
  source 1..136: mol_type = other RNA
tttggtgactgccacgcccagttttagagctagaaatagcaagttaaaataaggctagtccgttatcaacttgaaaaagtggcaccgagtcggtgcggactgcggaggccagcagtgaacaccccttgggcgtggc

SEQ ID NO: 3530 - RNA, 136 nt, synthetic construct
  misc_feature 1..136: note = Description of Artificial Sequence: Synthetic polynucleotide
  source 1..136: mol_type = other RNA
gtttggtgactgccacgcccagttttagagctagaaatagcaagttaaaataaggctagtccgttatcaacttgaaaaagtggcaccgagtcggtgcgaggccagcagtgaacacccgttgggcgtggcttttttt

SEQ ID NO: 3531 - RNA, 136 nt, synthetic construct
  misc_feature 1..136: note = Description of Artificial Sequence: Synthetic polynucleotide
  source 1..136: mol_type = other RNA
gtttggtgactgccacgcccagttttagagctagaaatagcaagttaaaataaggctagtccgttatcaacttgaaaaagtggcaccgagtcggtgcgccagcagtgaacaccccttgggcgtggcagtttttttt

SEQ ID NO: 3532 - RNA, 136 nt, synthetic construct
  misc_feature 1..136: note = Description of Artificial Sequence: Synthetic polynucleotide
  source 1..136: mol_type = other RNA
gtttggtgactgccacgcccagttttagagctagaaatagcaagttaaaataaggctagtccgttatcaacttgaaaaagtggcaccgagtcggtgcgaggccagcagtgaacaccccttgggcgtggcttttttt

SEQ ID NO: 3533 - RNA, 136 nt, synthetic construct
  misc_feature 1..136: note = Description of Artificial Sequence: Synthetic polynucleotide
  source 1..136: mol_type = other RNA
tttggtgactgccacgcccagttttagagctagaaatagcaagttaaaataaggctagtccgttatcaacttgaaaaagtggcaccgagtcggtgctgcggaggccagcagtgaacaccctttgggcgtggcagtc

SEQ ID NO: 3534 - RNA, 136 nt, synthetic construct
  misc_feature 1..136: note = Description of Artificial Sequence: Synthetic polynucleotide
  source 1..136: mol_type = other RNA
gtttggtgactgccacgcccagttttagagctagaaatagcaagttaaaataaggctagtccgttatcaacttgaaaaagtggcaccgagtcggtgcgccagcagtgaacacccgttgggcgtggcagtttttttt

SEQ ID NO: 3535 - RNA, 136 nt, synthetic construct
  misc_feature 1..136: note = Description of Artificial Sequence: Synthetic polynucleotide
  source 1..136: mol_type = other RNA
tttggtgactgccacgcccagttttagagctagaaatagcaagttaaaataaggctagtccgttatcaacttgaaaaagtggcaccgagtcggtgcgcggaggccagcagtgaacacccattgggcgtggcagtca

SEQ ID NO: 3536 - RNA, 136 nt, synthetic construct
  misc_feature 1..136: note = Description of Artificial Sequence: Synthetic polynucleotide
  source 1..136: mol_type = other RNA
tttggtgactgccacgcccagttttagagctagaaatagcaagttaaaataaggctagtccgttatcaacttgaaaaagtggcaccgagtcggtgcggaggccagcagtgaacaccctttgggcgtggcagtcacc

SEQ ID NO: 3537 - RNA, 136 nt, synthetic construct
  misc_feature 1..136: note = Description of Artificial Sequence: Synthetic polynucleotide
  source 1..136: mol_type = other RNA
gtttggtgactgccacgcccagttttagagctagaaatagcaagttaaaataaggctagtccgttatcaacttgaaaaagtggcaccgagtcggtgcgaggccagcagtgaacacccattgggcgtggcttttttt

SEQ ID NO: 3538 - RNA, 136 nt, synthetic construct
  misc_feature 1..136: note = Description of Artificial Sequence: Synthetic polynucleotide
  source 1..136: mol_type = other RNA
gtttggtgactgccacgcccagttttagagctagaaatagcaagttaaaataaggctagtccgttatcaacttgaaaaagtggcaccgagtcggtgcgccagcagtgaacaccctttgggcgtggcagtttttttt

SEQ ID NO: 3539 - RNA, 136 nt, synthetic construct
  misc_feature 1..136: note = Description of Artificial Sequence: Synthetic polynucleotide
  source 1..136: mol_type = other RNA
gtttggtgactgccacgcccagttttagagctagaaatagcaagttaaaataaggctagtccgttatcaacttgaaaaagtggcaccgagtcggtgcgccagcagtgaacacccattgggcgtggcagtttttttt

SEQ ID NO: 3540 - RNA, 136 nt, synthetic construct
  misc_feature 1..136: note = Description of Artificial Sequence: Synthetic polynucleotide
  source 1..136: mol_type = other RNA
tttggtgactgccacgcccagttttagagctagaaatagcaagttaaaataaggctagtccgttatcaacttgaaaaagtggcaccgagtcggtgcgccagcagtgaacatcccttgggcgtggcagtcacctttt

SEQ ID NO: 3541 - RNA, 136 nt, synthetic construct
  misc_feature 1..136: note = Description of Artificial Sequence: Synthetic polynucleotide
  source 1..136: mol_type = other RNA
gtttggtgactgccacgcccagttttagagctagaaatagcaagttaaaataaggctagtccgttatcaacttgaaaaagtggcaccgagtcggtgcagcagtgaacacccattgggcgtggcagtcacttttttt

SEQ ID NO: 3542 - RNA, 136 nt, synthetic construct
  misc_feature 1..136: note = Description of Artificial Sequence: Synthetic polynucleotide
  source 1..136: mol_type = other RNA
tttggtgactgccacgcccagttttagagctagaaatagcaagttaaaataaggctagtccgttatcaacttgaaaaagtggcaccgagtcggtgcggactgcggaggccagcagtgaacacccattgggcgtggc

SEQ ID NO: 3543 - RNA, 136 nt, synthetic construct
  misc_feature 1..136: note = Description of Artificial Sequence: Synthetic polynucleotide
  source 1..136: mol_type = other RNA
tttggtgactgccacgcccagttttagagctagaaatagcaagttaaaataaggctagtccgttatcaacttgaaaaagtggcaccgagtcggtgcgactgcggaggccagcagtgaacaccccttgggcgtggca

SEQ ID NO: 3544 - RNA, 136 nt, synthetic construct
  misc_feature 1..136: note = Description of Artificial Sequence: Synthetic polynucleotide
  source 1..136: mol_type = other RNA
gtttggtgactgccacgcccagttttagagctagaaatagcaagttaaaataaggctagtccgttatcaacttgaaaaagtggcaccgagtcggtgcagcagtgaacacccattgggcgtggcagtcacctttttt

SEQ ID NO: 3545 - RNA, 136 nt, synthetic construct
  misc_feature 1..136: note = Description of Artificial Sequence: Synthetic polynucleotide
  source 1..136: mol_type = other RNA
gtttggtgactgccacgcccagttttagagctagaaatagcaagttaaaataaggctagtccgttatcaacttgaaaaagtggcaccgagtcggtgcaggccagcagtgaacacccattgggcgtggcattttttt

SEQ ID NO: 3546 - RNA, 136 nt, synthetic construct
  misc_feature 1..136: note = Description of Artificial Sequence: Synthetic polynucleotide
  source 1..136: mol_type = other RNA
tttggtgactgccacgcccagttttagagctagaaatagcaagttaaaataaggctagtccgttatcaacttgaaaaagtggcaccgagtcggtgcgcggaggccagcagtgaacacccgttgggcgtggcagtca

SEQ ID NO: 3547 - RNA, 136 nt, synthetic construct
  misc_feature 1..136: note = Description of Artificial Sequence: Synthetic polynucleotide
  source 1..136: mol_type = other RNA
tttggtgactgccacgcccagttttagagctagaaatagcaagttaaaataaggctagtccgttatcaacttgaaaaagtggcaccgagtcggtgctgcggaggccagcagtgaacacccattgggcgtggcagtc

SEQ ID NO: 3548 - RNA, 136 nt, synthetic construct
  misc_feature 1..136: note = Description of Artificial Sequence: Synthetic polynucleotide
  source 1..136: mol_type = other RNA
gtttggtgactgccacgcccagttttagagctagaaatagcaagttaaaataaggctagtccgttatcaacttgaaaaagtggcaccgagtcggtgcagcagtgaacaccctttgggcgtggcagtcacctttttt

SEQ ID NO: 3549 - RNA, 136 nt, synthetic construct
  misc_feature 1..136: note = Description of Artificial Sequence: Synthetic polynucleotide
  source 1..136: mol_type = other RNA
tttggtgactgccacgcccagttttagagctagaaatagcaagttaaaataaggctagtccgttatcaacttgaaaaagtggcaccgagtcggtgcactgcggaggccagcagtgaacacccattgggcgtggcag

SEQ ID NO: 3550 - RNA, 136 nt, synthetic construct
  misc_feature 1..136: note = Description of Artificial Sequence: Synthetic polynucleotide
  source 1..136: mol_type = other RNA
tttggtgactgccacgcccagttttagagctagaaatagcaagttaaaataaggctagtccgttatcaacttgaaaaagtggcaccgagtcggtgcgactgcggaggccagcagtgaacaccctttgggcgtggca

SEQ ID NO: 3551 - RNA, 136 nt, synthetic construct
  misc_feature 1..136: note = Description of Artificial Sequence: Synthetic polynucleotide
  source 1..136: mol_type = other RNA
gtttggtgactgccacgcccagttttagagctagaaatagcaagttaaaataaggctagtccgttatcaacttgaaaaagtggcaccgagtcggtgcagcagtgaacacccgttgggcgtggcagtcacttttttt

SEQ ID NO: 3552 - RNA, 136 nt, synthetic construct
  misc_feature 1..136: note = Description of Artificial Sequence: Synthetic polynucleotide
  source 1..136: mol_type = other RNA
tttggtgactgccacgcccagttttagagctagaaatagcaagttaaaataaggctagtccgttatcaacttgaaaaagtggcaccgagtcggtgcgccagcagtgaacatccgttgggcgtggcagtcacctttt

SEQ ID NO: 3553 - RNA, 136 nt, synthetic construct
  misc_feature 1..136: note = Description of Artificial Sequence: Synthetic polynucleotide
  source 1..136: mol_type = other RNA
tttggtgactgccacgcccagttttagagctagaaatagcaagttaaaataaggctagtccgttatcaacttgaaaaagtggcaccgagtcggtgcactgcggaggccagcagtgaacaccccttgggcgtggcag

SEQ ID NO: 3554 - RNA, 136 nt, synthetic construct
  misc_feature 1..136: note = Description of Artificial Sequence: Synthetic polynucleotide
  source 1..136: mol_type = other RNA
tttggtgactgccacgcccagttttagagctagaaatagcaagttaaaataaggctagtccgttatcaacttgaaaaagtggcaccgagtcggtgcggactgcggaggccagcagtgaacaccctttgggcgtggc

SEQ ID NO: 3555 - RNA, 136 nt, synthetic construct
  misc_feature 1..136: note = Description of Artificial Sequence: Synthetic polynucleotide
  source 1..136: mol_type = other RNA
tttggtgactgccacgcccagttttagagctagaaatagcaagttaaaataaggctagtccgttatcaacttgaaaaagtggcaccgagtcggtgcactgcggaggccagcagtgaacaccctttgggcgtggcag

SEQ ID NO: 3556 - RNA, 136 nt, synthetic construct
  misc_feature 1..136: note = Description of Artificial Sequence: Synthetic polynucleotide
  source 1..136: mol_type = other RNA
gtttggtgactgccacgcccagttttagagctagaaatagcaagttaaaataaggctagtccgttatcaacttgaaaaagtggcaccgagtcggtgcggccagcagtgaacacccattgggcgtggcagttttttt

SEQ ID NO: 3557 - RNA, 136 nt, synthetic construct
  misc_feature 1..136: note = Description of Artificial Sequence: Synthetic polynucleotide
  source 1..136: mol_type = other RNA
tttggtgactgccacgcccagttttagagctagaaatagcaagttaaaataaggctagtccgttatcaacttgaaaaagtggcaccgagtcggtgctgcggaggccagcagtgaacacccgttgggcgtggcagtc

SEQ ID NO: 3558 - RNA, 136 nt, synthetic construct
  misc_feature 1..136: note = Description of Artificial Sequence: Synthetic polynucleotide
  source 1..136: mol_type = other RNA
gtttggtgactgccacgcccagttttagagctagaaatagcaagttaaaataaggctagtccgttatcaacttgaaaaagtggcaccgagtcggtgcgcagtgaacacccgttgggcgtggcagtcaccttttttt

SEQ ID NO: 3559 - RNA, 136 nt, synthetic construct
  misc_feature 1..136: note = Description of Artificial Sequence: Synthetic polynucleotide
  source 1..136: mol_type = other RNA
gtttggtgactgccacgcccagttttagagctagaaatagcaagttaaaataaggctagtccgttatcaacttgaaaaagtggcaccgagtcggtgcaggccagcagtgaacacccgttgggcgtggcattttttt

SEQ ID NO: 3560 - RNA, 136 nt, synthetic construct
  misc_feature 1..136: note = Description of Artificial Sequence: Synthetic polynucleotide
  source 1..136: mol_type = other RNA
tttggtgactgccacgcccagttttagagctagaaatagcaagttaaaataaggctagtccgttatcaacttgaaaaagtggcaccgagtcggtgcggaggccagcagtgaacacccgttgggcgtggcagtcacc

SEQ ID NO: 3561 - RNA, 136 nt, synthetic construct
  misc_feature 1..136: note = Description of Artificial Sequence: Synthetic polynucleotide
  source 1..136: mol_type = other RNA
tttggtgactgccacgcccagttttagagctagaaatagcaagttaaaataaggctagtccgttatcaacttgaaaaagtggcaccgagtcggtgctgcggaggccagcagtgaacaccccttgggcgtggcagtc

SEQ ID NO: 3562 - RNA, 136 nt, synthetic construct
  misc_feature 1..136: note = Description of Artificial Sequence: Synthetic polynucleotide
  source 1..136: mol_type = other RNA
gtttggtgactgccacgcccagttttagagctagaaatagcaagttaaaataaggctagtccgttatcaacttgaaaaagtggcaccgagtcggtgcgcagtgaacaccccttgggcgtggcagtcaccttttttt

SEQ ID NO: 3563 - RNA, 136 nt, synthetic construct
  misc_feature 1..136: note = Description of Artificial Sequence: Synthetic polynucleotide
  source 1..136: mol_type = other RNA
tttggtgactgccacgcccagttttagagctagaaatagcaagttaaaataaggctagtccgttatcaacttgaaaaagtggcaccgagtcggtgcactgcggaggccagcagtgaacacccgttgggcgtggcag

SEQ ID NO: 3564 - RNA, 137 nt, synthetic construct
  misc_feature 1..137: note = Description of Artificial Sequence: Synthetic polynucleotide
  source 1..137: mol_type = other RNA
tttggtgactgccacgcccagttttagagctagaaatagcaagttaaaataaggctagtccgttatcaacttgaaaaagtggcaccgagtcggtgcgggactgcggaggccagcagtgaacacccattgggcgtggc

SEQ ID NO: 3565 - RNA, 137 nt, synthetic construct
  misc_feature 1..137: note = Description of Artificial Sequence: Synthetic polynucleotide
  source 1..137: mol_type = other RNA
gtttggtgactgccacgcccagttttagagctagaaatagcaagttaaaataaggctagtccgttatcaacttgaaaaagtggcaccgagtcggtgcagcagtgaacaccctttgggcgtggcagtcaccttttttt

SEQ ID NO: 3566 - RNA, 137 nt, synthetic construct
  misc_feature 1..137: note = Description of Artificial Sequence: Synthetic polynucleotide
  source 1..137: mol_type = other RNA
gtttggtgactgccacgcccagttttagagctagaaatagcaagttaaaataaggctagtccgttatcaacttgaaaaagtggcaccgagtcggtgcaggccagcagtgaacacccattgggcgtggcagttttttt

SEQ ID NO: 3567 - RNA, 137 nt, synthetic construct
  misc_feature 1..137: note = Description of Artificial Sequence: Synthetic polynucleotide
  source 1..137: mol_type = other RNA
tttggtgactgccacgcccagttttagagctagaaatagcaagttaaaataaggctagtccgttatcaacttgaaaaagtggcaccgagtcggtgcgactgcggaggccagcagtgaacacccgttgggcgtggcag

SEQ ID NO: 3568 - RNA, 137 nt, synthetic construct
  misc_feature 1..137: note = Description of Artificial Sequence: Synthetic polynucleotide
  source 1..137: mol_type = other RNA
tttggtgactgccacgcccagttttagagctagaaatagcaagttaaaataaggctagtccgttatcaacttgaaaaagtggcaccgagtcggtgcgcggaggccagcagtgaacaccctttgggcgtggcagtcac

SEQ ID NO: 3569 - RNA, 137 nt, synthetic construct
  misc_feature 1..137: note = Description of Artificial Sequence: Synthetic polynucleotide
  source 1..137: mol_type = other RNA
tttggtgactgccacgcccagttttagagctagaaatagcaagttaaaataaggctagtccgttatcaacttgaaaaagtggcaccgagtcggtgcgcggaggccagcagtgaacacccgttgggcgtggcagtcac

SEQ ID NO: 3570 - RNA, 137 nt, synthetic construct
  misc_feature 1..137: note = Description of Artificial Sequence: Synthetic polynucleotide
  source 1..137: mol_type = other RNA
gtttggtgactgccacgcccagttttagagctagaaatagcaagttaaaataaggctagtccgttatcaacttgaaaaagtggcaccgagtcggtgcgccagcagtgaacacccgttgggcgtggcagtcatttttt

SEQ ID NO: 3571 - RNA, 137 nt, synthetic construct
  misc_feature 1..137: note = Description of Artificial Sequence: Synthetic polynucleotide
  source 1..137: mol_type = other RNA
tttggtgactgccacgcccagttttagagctagaaatagcaagttaaaataaggctagtccgttatcaacttgaaaaagtggcaccgagtcggtgcgactgcggaggccagcagtgaacaccctttgggcgtggcag

SEQ ID NO: 3572 - RNA, 137 nt, synthetic construct
  misc_feature 1..137: note = Description of Artificial Sequence: Synthetic polynucleotide
  source 1..137: mol_type = other RNA
gtttggtgactgccacgcccagttttagagctagaaatagcaagttaaaataaggctagtccgttatcaacttgaaaaagtggcaccgagtcggtgcggccagcagtgaacaccccttgggcgtggcagtttttttt

SEQ ID NO: 3573 - RNA, 137 nt, synthetic construct
  misc_feature 1..137: note = Description of Artificial Sequence: Synthetic polynucleotide
  source 1..137: mol_type = other RNA
gtttggtgactgccacgcccagttttagagctagaaatagcaagttaaaataaggctagtccgttatcaacttgaaaaagtggcaccgagtcggtgcaggccagcagtgaacaccctttgggcgtggcagttttttt

SEQ ID NO: 3574 - RNA, 137 nt, synthetic construct
  misc_feature 1..137: note = Description of Artificial Sequence: Synthetic polynucleotide
  source 1..137: mol_type = other RNA
tttggtgactgccacgcccagttttagagctagaaatagcaagttaaaataaggctagtccgttatcaacttgaaaaagtggcaccgagtcggtgctgcggaggccagcagtgaacacccgttgggcgtggcagtca

SEQ ID NO: 3575 - RNA, 137 nt, synthetic construct
  misc_feature 1..137: note = Description of Artificial Sequence: Synthetic polynucleotide
  source 1..137: mol_type = other RNA
tttggtgactgccacgcccagttttagagctagaaatagcaagttaaaataaggctagtccgttatcaacttgaaaaagtggcaccgagtcggtgctgcggaggccagcagtgaacaccccttgggcgtggcagtca

SEQ ID NO: 3576 - RNA, 137 nt, synthetic construct
  misc_feature 1..137: note = Description of Artificial Sequence: Synthetic polynucleotide
  source 1..137: mol_type = other RNA
tttggtgactgccacgcccagttttagagctagaaatagcaagttaaaataaggctagtccgttatcaacttgaaaaagtggcaccgagtcggtgcactgcggaggccagcagtgaacaccctttgggcgtggcagt

SEQ ID NO: 3577 - RNA, 137 nt, synthetic construct
  misc_feature 1..137: note = Description of Artificial Sequence: Synthetic polynucleotide
  source 1..137: mol_type = other RNA
gtttggtgactgccacgcccagttttagagctagaaatagcaagttaaaataaggctagtccgttatcaacttgaaaaagtggcaccgagtcggtgcgcagtgaacaccctttgggcgtggcagtcaccaatttttt

SEQ ID NO: 3578 - RNA, 137 nt, synthetic construct
  misc_feature 1..137: note = Description of Artificial Sequence: Synthetic polynucleotide
  source 1..137: mol_type = other RNA
tttggtgactgccacgcccagttttagagctagaaatagcaagttaaaataaggctagtccgttatcaacttgaaaaagtggcaccgagtcggtgcggactgcggaggccagcagtgaacaccctttgggcgtggca

SEQ ID NO: 3579 - RNA, 137 nt, synthetic construct
  misc_feature 1..137: note = Description of Artificial Sequence: Synthetic polynucleotide
  source 1..137: mol_type = other RNA
tttggtgactgccacgcccagttttagagctagaaatagcaagttaaaataaggctagtccgttatcaacttgaaaaagtggcaccgagtcggtgcgcggaggccagcagtgaacacccattgggcgtggcagtcac

SEQ ID NO: 3580 - RNA, 137 nt, synthetic construct
  misc_feature 1..137: note = Description of Artificial Sequence: Synthetic polynucleotide
  source 1..137: mol_type = other RNA
tttggtgactgccacgcccagttttagagctagaaatagcaagttaaaataaggctagtccgttatcaacttgaaaaagtggcaccgagtcggtgcgcggaggccagcagtgaacaccccttgggcgtggcagtcac

SEQ ID NO: 3581 - RNA, 137 nt, synthetic construct
  misc_feature 1..137: note = Description of Artificial Sequence: Synthetic polynucleotide
  source 1..137: mol_type = other RNA
tttggtgactgccacgcccagttttagagctagaaatagcaagttaaaataaggctagtccgttatcaacttgaaaaagtggcaccgagtcggtgcgggactgcggaggccagcagtgaacacccgttgggcgtggc

SEQ ID NO: 3582 - RNA, 137 nt, synthetic construct
  misc_feature 1..137: note = Description of Artificial Sequence: Synthetic polynucleotide
  source 1..137: mol_type = other RNA
gtttggtgactgccacgcccagttttagagctagaaatagcaagttaaaataaggctagtccgttatcaacttgaaaaagtggcaccgagtcggtgcggaggccagcagtgaacaccctttgggcgtggcttttttt

SEQ ID NO: 3583 - RNA, 137 nt, synthetic construct
  misc_feature 1..137: note = Description of Artificial Sequence: Synthetic polynucleotide
  source 1..137: mol_type = other RNA
tttggtgactgccacgcccagttttagagctagaaatagcaagttaaaataaggctagtccgttatcaacttgaaaaagtggcaccgagtcggtgcactgcggaggccagcagtgaacaccccttgggcgtggcagt

SEQ ID NO: 3584 - RNA, 137 nt, synthetic construct
  misc_feature 1..137: note = Description of Artificial Sequence: Synthetic polynucleotide
  source 1..137: mol_type = other RNA
tttggtgactgccacgcccagttttagagctagaaatagcaagttaaaataaggctagtccgttatcaacttgaaaaagtggcaccgagtcggtgcactgcggaggccagcagtgaacacccattgggcgtggcagt

SEQ ID NO: 3585 - RNA, 137 nt, synthetic construct
  misc_feature 1..137: note = Description of Artificial Sequence: Synthetic polynucleotide
  source 1..137: mol_type = other RNA
tttggtgactgccacgcccagttttagagctagaaatagcaagttaaaataaggctagtccgttatcaacttgaaaaagtggcaccgagtcggtgctgcggaggccagcagtgaacacccattgggcgtggcagtca

SEQ ID NO: 3586 - RNA, 137 nt, synthetic construct
  misc_feature 1..137: note = Description of Artificial Sequence: Synthetic polynucleotide
  source 1..137: mol_type = other RNA
gtttggtgactgccacgcccagttttagagctagaaatagcaagttaaaataaggctagtccgttatcaacttgaaaaagtggcaccgagtcggtgcggaggccagcagtgaacacccattgggcgtggcttttttt

SEQ ID NO: 3587 - RNA, 137 nt, synthetic construct
  misc_feature 1..137: note = Description of Artificial Sequence: Synthetic polynucleotide
  source 1..137: mol_type = other RNA
gtttggtgactgccacgcccagttttagagctagaaatagcaagttaaaataaggctagtccgttatcaacttgaaaaagtggcaccgagtcggtgcgaggccagcagtgaacaccctttgggcgtggcattttttt

SEQ ID NO: 3588 - RNA, 137 nt, synthetic construct
  misc_feature 1..137: note = Description of Artificial Sequence: Synthetic polynucleotide
  source 1..137: mol_type = other RNA
gtttggtgactgccacgcccagttttagagctagaaatagcaagttaaaataaggctagtccgttatcaacttgaaaaagtggcaccgagtcggtgcgccagcagtgaacacccattgggcgtggcagtcttttttt

SEQ ID NO: 3589 - RNA, 137 nt, synthetic construct
  misc_feature 1..137: note = Description of Artificial Sequence: Synthetic polynucleotide
  source 1..137: mol_type = other RNA
gtttggtgactgccacgcccagttttagagctagaaatagcaagttaaaataaggctagtccgttatcaacttgaaaaagtggcaccgagtcggtgcggccagcagtgaacacccgttgggcgtggcagtttttttt

SEQ ID NO: 3590 - RNA, 137 nt, synthetic construct
  misc_feature 1..137: note = Description of Artificial Sequence: Synthetic polynucleotide
  source 1..137: mol_type = other RNA
gtttggtgactgccacgcccagttttagagctagaaatagcaagttaaaataaggctagtccgttatcaacttgaaaaagtggcaccgagtcggtgcaggccagcagtgaacacccgttgggcgtggcagttttttt

SEQ ID NO: 3591 - RNA, 137 nt, synthetic construct
  misc_feature 1..137: note = Description of Artificial Sequence: Synthetic polynucleotide
  source 1..137: mol_type = other RNA
gtttggtgactgccacgcccagttttagagctagaaatagcaagttaaaataaggctagtccgttatcaacttgaaaaagtggcaccgagtcggtgcgcagtgaacacccgttgggcgtggcagtcaccaatttttt

SEQ ID NO: 3592 - RNA, 137 nt, synthetic construct
  misc_feature 1..137: note = Description of Artificial Sequence: Synthetic polynucleotide
  source 1..137: mol_type = other RNA
tttggtgactgccacgcccagttttagagctagaaatagcaagttaaaataaggctagtccgttatcaacttgaaaaagtggcaccgagtcggtgcgactgcggaggccagcagtgaacaccccttgggcgtggcag

SEQ ID NO: 3593 - RNA, 137 nt, synthetic construct
  misc_feature 1..137: note = Description of Artificial Sequence: Synthetic polynucleotide
  source 1..137: mol_type = other RNA
gtttggtgactgccacgcccagttttagagctagaaatagcaagttaaaataaggctagtccgttatcaacttgaaaaagtggcaccgagtcggtgcagcagtgaacacccgttgggcgtggcagtcaccttttttt

SEQ ID NO: 3594 - RNA, 137 nt, synthetic construct
  misc_feature 1..137: note = Description of Artificial Sequence: Synthetic polynucleotide
  source 1..137: mol_type = other RNA
tttggtgactgccacgcccagttttagagctagaaatagcaagttaaaataaggctagtccgttatcaacttgaaaaagtggcaccgagtcggtgcactgcggaggccagcagtgaacacccgttgggcgtggcagt

SEQ ID NO: 3595 - RNA, 137 nt, synthetic construct
  misc_feature 1..137: note = Description of Artificial Sequence: Synthetic polynucleotide
  source 1..137: mol_type = other RNA
tttggtgactgccacgcccagttttagagctagaaatagcaagttaaaataaggctagtccgttatcaacttgaaaaagtggcaccgagtcggtgcggactgcggaggccagcagtgaacaccccttgggcgtggca

SEQ ID NO: 3596 - RNA, 137 nt, synthetic construct
  misc_feature 1..137: note = Description of Artificial Sequence: Synthetic polynucleotide
  source 1..137: mol_type = other RNA
tttggtgactgccacgcccagttttagagctagaaatagcaagttaaaataaggctagtccgttatcaacttgaaaaagtggcaccgagtcggtgcggactgcggaggccagcagtgaacacccgttgggcgtggca

SEQ ID NO: 3597 - RNA, 137 nt, synthetic construct
  misc_feature 1..137: note = Description of Artificial Sequence: Synthetic polynucleotide
  source 1..137: mol_type = other RNA
tttggtgactgccacgcccagttttagagctagaaatagcaagttaaaataaggctagtccgttatcaacttgaaaaagtggcaccgagtcggtgcgggactgcggaggccagcagtgaacaccccttgggcgtggc

SEQ ID NO: 3598 - RNA, 137 nt, synthetic construct
  misc_feature 1..137: note = Description of Artificial Sequence: Synthetic polynucleotide
  source 1..137: mol_type = other RNA
gtttggtgactgccacgcccagttttagagctagaaatagcaagttaaaataaggctagtccgttatcaacttgaaaaagtggcaccgagtcggtgcgaggccagcagtgaacaccccttgggcgtggcattttttt

SEQ ID NO: 3599 - RNA, 137 nt, synthetic construct
  misc_feature 1..137: note = Description of Artificial Sequence: Synthetic polynucleotide
  source 1..137: mol_type = other RNA
gtttggtgactgccacgcccagttttagagctagaaatagcaagttaaaataaggctagtccgttatcaacttgaaaaagtggcaccgagtcggtgcggccagcagtgaacacccattgggcgtggcagtttttttt

SEQ ID NO: 3600 - RNA, 137 nt, synthetic construct
  misc_feature 1..137: note = Description of Artificial Sequence: Synthetic polynucleotide
  source 1..137: mol_type = other RNA
gtttggtgactgccacgcccagttttagagctagaaatagcaagttaaaataaggctagtccgttatcaacttgaaaaagtggcaccgagtcggtgcgcagtgaacacccattgggcgtggcagtcaccaatttttt

SEQ ID NO: 3601 - RNA, 137 nt, synthetic construct
  misc_feature 1..137: note = Description of Artificial Sequence: Synthetic polynucleotide
  source 1..137: mol_type = other RNA
gtttggtgactgccacgcccagttttagagctagaaatagcaagttaaaataaggctagtccgttatcaacttgaaaaagtggcaccgagtcggtgcgcagtgaacaccccttgggcgtggcagtcaccaatttttt

SEQ ID NO: 3602 - RNA, 137 nt, synthetic construct
  misc_feature 1..137: note = Description of Artificial Sequence: Synthetic polynucleotide
  source 1..137: mol_type = other RNA
gtttggtgactgccacgcccagttttagagctagaaatagcaagttaaaataaggctagtccgttatcaacttgaaaaagtggcaccgagtcggtgcgccagcagtgaacacccattgggcgtggcagtcatttttt

SEQ ID NO: 3603 - RNA, 137 nt, synthetic construct
  misc_feature 1..137: note = Description of Artificial Sequence: Synthetic polynucleotide
  source 1..137: mol_type = other RNA
tttggtgactgccacgcccagttttagagctagaaatagcaagttaaaataaggctagtccgttatcaacttgaaaaagtggcaccgagtcggtgcgactgcggaggccagcagtgaacacccattgggcgtggcag

SEQ ID NO: 3604 - RNA, 137 nt, synthetic construct
  misc_feature 1..137: note = Description of Artificial Sequence: Synthetic polynucleotide
  source 1..137: mol_type = other RNA
gtttggtgactgccacgcccagttttagagctagaaatagcaagttaaaataaggctagtccgttatcaacttgaaaaagtggcaccgagtcggtgcaggccagcagtgaacaccccttgggcgtggcagttttttt

SEQ ID NO: 3605 - RNA, 137 nt, synthetic construct
  misc_feature 1..137: note = Description of Artificial Sequence: Synthetic polynucleotide
  source 1..137: mol_type = other RNA
gtttggtgactgccacgcccagttttagagctagaaatagcaagttaaaataaggctagtccgttatcaacttgaaaaagtggcaccgagtcggtgcagcagtgaacacccattgggcgtggcagtcaccttttttt

SEQ ID NO: 3606 - RNA, 137 nt, synthetic construct
  misc_feature 1..137: note = Description of Artificial Sequence: Synthetic polynucleotide
  source 1..137: mol_type = other RNA
gtttggtgactgccacgcccagttttagagctagaaatagcaagttaaaataaggctagtccgttatcaacttgaaaaagtggcaccgagtcggtgcggccagcagtgaacaccctttgggcgtggcagtttttttt

SEQ ID NO: 3607 - RNA, 137 nt, synthetic construct
  misc_feature 1..137: note = Description of Artificial Sequence: Synthetic polynucleotide
  source 1..137: mol_type = other RNA
gtttggtgactgccacgcccagttttagagctagaaatagcaagttaaaataaggctagtccgttatcaacttgaaaaagtggcaccgagtcggtgcgccagcagtgaacacccgttgggcgtggcagtcttttttt

SEQ ID NO: 3608 - RNA, 137 nt, synthetic construct
  misc_feature 1..137: note = Description of Artificial Sequence: Synthetic polynucleotide
  source 1..137: mol_type = other RNA
gtttggtgactgccacgcccagttttagagctagaaatagcaagttaaaataaggctagtccgttatcaacttgaaaaagtggcaccgagtcggtgcgccagcagtgaacaccccttgggcgtggcagtcttttttt

SEQ ID NO: 3609 - RNA, 137 nt, synthetic construct
  misc_feature 1..137: note = Description of Artificial Sequence: Synthetic polynucleotide
  source 1..137: mol_type = other RNA
gtttggtgactgccacgcccagttttagagctagaaatagcaagttaaaataaggctagtccgttatcaacttgaaaaagtggcaccgagtcggtgcggaggccagcagtgaacaccccttgggcgtggcttttttt

SEQ ID NO: 3610 - RNA, 137 nt, synthetic construct
  misc_feature 1..137: note = Description of Artificial Sequence: Synthetic polynucleotide
  source 1..137: mol_type = other RNA
gtttggtgactgccacgcccagttttagagctagaaatagcaagttaaaataaggctagtccgttatcaacttgaaaaagtggcaccgagtcggtgcgaggccagcagtgaacacccgttgggcgtggcattttttt

SEQ ID NO: 3611 - RNA, 137 nt, synthetic construct
  misc_feature 1..137: note = Description of Artificial Sequence: Synthetic polynucleotide
  source 1..137: mol_type = other RNA
gtttggtgactgccacgcccagttttagagctagaaatagcaagttaaaataaggctagtccgttatcaacttgaaaaagtggcaccgagtcggtgcgccagcagtgaacaccctttgggcgtggcagtcatttttt

SEQ ID NO: 3612 - RNA, 137 nt, synthetic construct
  misc_feature 1..137: note = Description of Artificial Sequence: Synthetic polynucleotide
  source 1..137: mol_type = other RNA
tttggtgactgccacgcccagttttagagctagaaatagcaagttaaaataaggctagtccgttatcaacttgaaaaagtggcaccgagtcggtgcgggactgcggaggccagcagtgaacaccctttgggcgtggc

SEQ ID NO: 3613 - RNA, 137 nt, synthetic construct
  misc_feature 1..137: note = Description of Artificial Sequence: Synthetic polynucleotide
  source 1..137: mol_type = other RNA
tttggtgactgccacgcccagttttagagctagaaatagcaagttaaaataaggctagtccgttatcaacttgaaaaagtggcaccgagtcggtgctgcggaggccagcagtgaacaccctttgggcgtggcagtca

SEQ ID NO: 3614 - RNA, 137 nt, synthetic construct
  misc_feature 1..137: note = Description of Artificial Sequence: Synthetic polynucleotide
  source 1..137: mol_type = other RNA
gtttggtgactgccacgcccagttttagagctagaaatagcaagttaaaataaggctagtccgttatcaacttgaaaaagtggcaccgagtcggtgcgccagcagtgaacaccctttgggcgtggcagtcttttttt

SEQ ID NO: 3615 - RNA, 137 nt, synthetic construct
  misc_feature 1..137: note = Description of Artificial Sequence: Synthetic polynucleotide
  source 1..137: mol_type = other RNA
gtttggtgactgccacgcccagttttagagctagaaatagcaagttaaaataaggctagtccgttatcaacttgaaaaagtggcaccgagtcggtgcgccagcagtgaacaccccttgggcgtggcagtcatttttt

SEQ ID NO: 3616 - RNA, 137 nt, synthetic construct
  misc_feature 1..137: note = Description of Artificial Sequence: Synthetic polynucleotide
  source 1..137: mol_type = other RNA
gtttggtgactgccacgcccagttttagagctagaaatagcaagttaaaataaggctagtccgttatcaacttgaaaaagtggcaccgagtcggtgcgaggccagcagtgaacacccattgggcgtggcattttttt

SEQ ID NO: 3617 - RNA, 137 nt, synthetic construct
  misc_feature 1..137: note = Description of Artificial Sequence: Synthetic polynucleotide
  source 1..137: mol_type = other RNA
tttggtgactgccacgcccagttttagagctagaaatagcaagttaaaataaggctagtccgttatcaacttgaaaaagtggcaccgagtcggtgcggactgcggaggccagcagtgaacacccattgggcgtggca

SEQ ID NO: 3618 - RNA, 137 nt, synthetic construct
  misc_feature 1..137: note = Description of Artificial Sequence: Synthetic polynucleotide
  source 1..137: mol_type = other RNA
gtttggtgactgccacgcccagttttagagctagaaatagcaagttaaaataaggctagtccgttatcaacttgaaaaagtggcaccgagtcggtgcagcagtgaacaccccttgggcgtggcagtcaccttttttt

SEQ ID NO: 3619 - RNA, 137 nt, synthetic construct
  misc_feature 1..137: note = Description of Artificial Sequence: Synthetic polynucleotide
  source 1..137: mol_type = other RNA
gtttggtgactgccacgcccagttttagagctagaaatagcaagttaaaataaggctagtccgttatcaacttgaaaaagtggcaccgagtcggtgcggaggccagcagtgaacacccgttgggcgtggcttttttt

SEQ ID NO: 3620 - RNA, 138 nt, synthetic construct
  misc_feature 1..138: note = Description of Artificial Sequence: Synthetic polynucleotide
  source 1..138: mol_type = other RNA
gtttggtgactgccacgcccagttttagagctagaaatagcaagttaaaataaggctagtccgttatcaacttgaaaaagtggcaccgagtcggtgcggaggccagcagtgaacaccccttgggcgtggcattttttt

SEQ ID NO: 3621 - RNA, 138 nt, synthetic construct
  misc_feature 1..138: note = Description of Artificial Sequence: Synthetic polynucleotide
  source 1..138: mol_type = other RNA
gtttggtgactgccacgcccagttttagagctagaaatagcaagttaaaataaggctagtccgttatcaacttgaaaaagtggcaccgagtcggtgcggaggccagcagtgaacacccattgggcgtggcattttttt

SEQ ID NO: 3622 - RNA, 138 nt, synthetic construct
  misc_feature 1..138: note = Description of Artificial Sequence: Synthetic polynucleotide
  source 1..138: mol_type = other RNA
tttggtgactgccacgcccagttttagagctagaaatagcaagttaaaataaggctagtccgttatcaacttgaaaaagtggcaccgagtcggtgcgcggaggccagcagtgaacacccattgggcgtggcagtcacc

SEQ ID NO: 3623 - RNA, 138 nt, synthetic construct
  misc_feature 1..138: note = Description of Artificial Sequence: Synthetic polynucleotide
  source 1..138: mol_type = other RNA
gtttggtgactgccacgcccagttttagagctagaaatagcaagttaaaataaggctagtccgttatcaacttgaaaaagtggcaccgagtcggtgcgccagcagtgaacaccctttgggcgtggcagtcattttttt

SEQ ID NO: 3624 - RNA, 138 nt, synthetic construct
  misc_feature 1..138: note = Description of Artificial Sequence: Synthetic polynucleotide
  source 1..138: mol_type = other RNA
gtttggtgactgccacgcccagttttagagctagaaatagcaagttaaaataaggctagtccgttatcaacttgaaaaagtggcaccgagtcggtgcaggccagcagtgaacacccattgggcgtggcagtttttttt

SEQ ID NO: 3625 - RNA, 138 nt, synthetic construct
  misc_feature 1..138: note = Description of Artificial Sequence: Synthetic polynucleotide
  source 1..138: mol_type = other RNA
tttggtgactgccacgcccagttttagagctagaaatagcaagttaaaataaggctagtccgttatcaacttgaaaaagtggcaccgagtcggtgcggggactgcggaggccagcagtgaacacccattgggcgtggc

SEQ ID NO: 3626 - RNA, 138 nt, synthetic construct
  misc_feature 1..138: note = Description of Artificial Sequence: Synthetic polynucleotide
  source 1..138: mol_type = other RNA
tttggtgactgccacgcccagttttagagctagaaatagcaagttaaaataaggctagtccgttatcaacttgaaaaagtggcaccgagtcggtgcgcggaggccagcagtgaacaccccttgggcgtggcagtcacc

SEQ ID NO: 3627 - RNA, 138 nt, synthetic construct
  misc_feature 1..138: note = Description of Artificial Sequence: Synthetic polynucleotide
  source 1..138: mol_type = other RNA
tttggtgactgccacgcccagttttagagctagaaatagcaagttaaaataaggctagtccgttatcaacttgaaaaagtggcaccgagtcggtgctgcggaggccagcagtgaacacccattgggcgtggcagtcac

SEQ ID NO: 3628 - RNA, 138 nt, synthetic construct
  misc_feature 1..138: note = Description of Artificial Sequence: Synthetic polynucleotide
  source 1..138: mol_type = other RNA
tttggtgactgccacgcccagttttagagctagaaatagcaagttaaaataaggctagtccgttatcaacttgaaaaagtggcaccgagtcggtgcggggactgcggaggccagcagtgaacacccgttgggcgtggc

SEQ ID NO: 3629 - RNA, 138 nt, synthetic construct
  misc_feature 1..138: note = Description of Artificial Sequence: Synthetic polynucleotide
  source 1..138: mol_type = other RNA
gtttggtgactgccacgcccagttttagagctagaaatagcaagttaaaataaggctagtccgttatcaacttgaaaaagtggcaccgagtcggtgcgccagcagtgaacaccccttgggcgtggcagtcattttttt

SEQ ID NO: 3630 - RNA, 138 nt, synthetic construct
  misc_feature 1..138: note = Description of Artificial Sequence: Synthetic polynucleotide
  source 1..138: mol_type = other RNA
tttggtgactgccacgcccagttttagagctagaaatagcaagttaaaataaggctagtccgttatcaacttgaaaaagtggcaccgagtcggtgcgcggaggccagcagtgaacacccgttgggcgtggcagtcacc

SEQ ID NO: 3631 - RNA, 138 nt, synthetic construct
  misc_feature 1..138: note = Description of Artificial Sequence: Synthetic polynucleotide
  source 1..138: mol_type = other RNA
tttggtgactgccacgcccagttttagagctagaaatagcaagttaaaataaggctagtccgttatcaacttgaaaaagtggcaccgagtcggtgctgcggaggccagcagtgaacaccccttgggcgtggcagtcac

SEQ ID NO: 3632 - RNA, 138 nt, synthetic construct
  misc_feature 1..138: note = Description of Artificial Sequence: Synthetic polynucleotide
  source 1..138: mol_type = other RNA
tttggtgactgccacgcccagttttagagctagaaatagcaagttaaaataaggctagtccgttatcaacttgaaaaagtggcaccgagtcggtgcgggactgcggaggccagcagtgaacaccccttgggcgtggca

SEQ ID NO: 3633 - RNA, 138 nt, synthetic construct
  misc_feature 1..138: note = Description of Artificial Sequence: Synthetic polynucleotide
  source 1..138: mol_type = other RNA
tttggtgactgccacgcccagttttagagctagaaatagcaagttaaaataaggctagtccgttatcaacttgaaaaagtggcaccgagtcggtgcgggactgcggaggccagcagtgaacaccctttgggcgtggca

SEQ ID NO: 3634 - RNA, 138 nt, synthetic construct
  misc_feature 1..138: note = Description of Artificial Sequence: Synthetic polynucleotide
  source 1..138: mol_type = other RNA
gtttggtgactgccacgcccagttttagagctagaaatagcaagttaaaataaggctagtccgttatcaacttgaaaaagtggcaccgagtcggtgcgccagcagtgaacacccattgggcgtggcagtcattttttt

SEQ ID NO: 3635 - RNA, 138 nt, synthetic construct
  misc_feature 1..138: note = Description of Artificial Sequence: Synthetic polynucleotide
  source 1..138: mol_type = other RNA
tttggtgactgccacgcccagttttagagctagaaatagcaagttaaaataaggctagtccgttatcaacttgaaaaagtggcaccgagtcggtgcggactgcggaggccagcagtgaacaccctttgggcgtggcag

SEQ ID NO: 3636 - RNA, 138 nt, synthetic construct
  misc_feature 1..138: note = Description of Artificial Sequence: Synthetic polynucleotide
  source 1..138: mol_type = other RNA
tttggtgactgccacgcccagttttagagctagaaatagcaagttaaaataaggctagtccgttatcaacttgaaaaagtggcaccgagtcggtgcggactgcggaggccagcagtgaacaccccttgggcgtggcag

SEQ ID NO: 3637 - RNA, 138 nt, synthetic construct
  misc_feature 1..138: note = Description of Artificial Sequence: Synthetic polynucleotide
  source 1..138: mol_type = other RNA
gtttggtgactgccacgcccagttttagagctagaaatagcaagttaaaataaggctagtccgttatcaacttgaaaaagtggcaccgagtcggtgcgccagcagtgaacacccgttgggcgtggcagtcattttttt

SEQ ID NO: 3638 - RNA, 138 nt, synthetic construct
  misc_feature 1..138: note = Description of Artificial Sequence: Synthetic polynucleotide
  source 1..138: mol_type = other RNA
tttggtgactgccacgcccagttttagagctagaaatagcaagttaaaataaggctagtccgttatcaacttgaaaaagtggcaccgagtcggtgctgcggaggccagcagtgaacacccgttgggcgtggcagtcac

SEQ ID NO: 3639 - RNA, 138 nt, synthetic construct
  misc_feature 1..138: note = Description of Artificial Sequence: Synthetic polynucleotide
  source 1..138: mol_type = other RNA
tttggtgactgccacgcccagttttagagctagaaatagcaagttaaaataaggctagtccgttatcaacttgaaaaagtggcaccgagtcggtgcggggactgcggaggccagcagtgaacaccctttgggcgtggc

SEQ ID NO: 3640 - RNA, 138 nt, synthetic construct
  misc_feature 1..138: note = Description of Artificial Sequence: Synthetic polynucleotide
  source 1..138: mol_type = other RNA
tttggtgactgccacgcccagttttagagctagaaatagcaagttaaaataaggctagtccgttatcaacttgaaaaagtggcaccgagtcggtgcggactgcggaggccagcagtgaacacccattgggcgtggcag

SEQ ID NO: 3641 - RNA, 138 nt, synthetic construct
  misc_feature 1..138: note = Description of Artificial Sequence: Synthetic polynucleotide
  source 1..138: mol_type = other RNA
tttggtgactgccacgcccagttttagagctagaaatagcaagttaaaataaggctagtccgttatcaacttgaaaaagtggcaccgagtcggtgcactgcggaggccagcagtgaacaccccttgggcgtggcagtc

SEQ ID NO: 3642 - RNA, 138 nt, synthetic construct
  misc_feature 1..138: note = Description of Artificial Sequence: Synthetic polynucleotide
  source 1..138: mol_type = other RNA
tttggtgactgccacgcccagttttagagctagaaatagcaagttaaaataaggctagtccgttatcaacttgaaaaagtggcaccgagtcggtgcggggactgcggaggccagcagtgaacaccccttgggcgtggc

SEQ ID NO: 3643 - RNA, 138 nt, synthetic construct
  misc_feature 1..138: note = Description of Artificial Sequence: Synthetic polynucleotide
  source 1..138: mol_type = other RNA
gtttggtgactgccacgcccagttttagagctagaaatagcaagttaaaataaggctagtccgttatcaacttgaaaaagtggcaccgagtcggtgcagcagtgaacacccattgggcgtggcagtcaccaatttttt

SEQ ID NO: 3644 - RNA, 138 nt, synthetic construct
  misc_feature 1..138: note = Description of Artificial Sequence: Synthetic polynucleotide
  source 1..138: mol_type = other RNA
gtttggtgactgccacgcccagttttagagctagaaatagcaagttaaaataaggctagtccgttatcaacttgaaaaagtggcaccgagtcggtgcggaggccagcagtgaacacccgttgggcgtggcattttttt

SEQ ID NO: 3645 - RNA, 138 nt, synthetic construct
  misc_feature 1..138: note = Description of Artificial Sequence: Synthetic polynucleotide
  source 1..138: mol_type = other RNA
gtttggtgactgccacgcccagttttagagctagaaatagcaagttaaaataaggctagtccgttatcaacttgaaaaagtggcaccgagtcggtgcggccagcagtgaacaccccttgggcgtggcagtcttttttt

SEQ ID NO: 3646 - RNA, 138 nt, synthetic construct
  misc_feature 1..138: note = Description of Artificial Sequence: Synthetic polynucleotide
  source 1..138: mol_type = other RNA
tttggtgactgccacgcccagttttagagctagaaatagcaagttaaaataaggctagtccgttatcaacttgaaaaagtggcaccgagtcggtgcactgcggaggccagcagtgaacacccattgggcgtggcagtc

SEQ ID NO: 3647 - RNA, 138 nt, synthetic construct
  misc_feature 1..138: note = Description of Artificial Sequence: Synthetic polynucleotide
  source 1..138: mol_type = other RNA
tttggtgactgccacgcccagttttagagctagaaatagcaagttaaaataaggctagtccgttatcaacttgaaaaagtggcaccgagtcggtgcgggactgcggaggccagcagtgaacacccattgggcgtggca

SEQ ID NO: 3648 - RNA, 138 nt, synthetic construct
  misc_feature 1..138: note = Description of Artificial Sequence: Synthetic polynucleotide
  source 1..138: mol_type = other RNA
tttggtgactgccacgcccagttttagagctagaaatagcaagttaaaataaggctagtccgttatcaacttgaaaaagtggcaccgagtcggtgcgcggaggccagcagtgaacaccctttgggcgtggcagtcacc

SEQ ID NO: 3649 - RNA, 138 nt, synthetic construct
  misc_feature 1..138: note = Description of Artificial Sequence: Synthetic polynucleotide
  source 1..138: mol_type = other RNA
gtttggtgactgccacgcccagttttagagctagaaatagcaagttaaaataaggctagtccgttatcaacttgaaaaagtggcaccgagtcggtgcgaggccagcagtgaacacccattgggcgtggcagttttttt

SEQ ID NO: 3650 - RNA, 138 nt, synthetic construct
  misc_feature 1..138: note = Description of Artificial Sequence: Synthetic polynucleotide
  source 1..138: mol_type = other RNA
tttggtgactgccacgcccagttttagagctagaaatagcaagttaaaataaggctagtccgttatcaacttgaaaaagtggcaccgagtcggtgcgccagcagtgaacatcccttgggcgtggcagtcaccaatttt

SEQ ID NO: 3651 - RNA, 138 nt, synthetic construct
  misc_feature 1..138: note = Description of Artificial Sequence: Synthetic polynucleotide
  source 1..138: mol_type = other RNA
gtttggtgactgccacgcccagttttagagctagaaatagcaagttaaaataaggctagtccgttatcaacttgaaaaagtggcaccgagtcggtgcagcagtgaacaccctttgggcgtggcagtcaccaatttttt

SEQ ID NO: 3652 - RNA, 138 nt, synthetic construct
  misc_feature 1..138: note = Description of Artificial Sequence: Synthetic polynucleotide
  source 1..138: mol_type = other RNA
gtttggtgactgccacgcccagttttagagctagaaatagcaagttaaaataaggctagtccgttatcaacttgaaaaagtggcaccgagtcggtgcaggccagcagtgaacaccccttgggcgtggcagtttttttt

SEQ ID NO: 3653 - RNA, 138 nt, synthetic construct
  misc_feature 1..138: note = Description of Artificial Sequence: Synthetic polynucleotide
  source 1..138: mol_type = other RNA
tttggtgactgccacgcccagttttagagctagaaatagcaagttaaaataaggctagtccgttatcaacttgaaaaagtggcaccgagtcggtgcgccagcagtgaacatccgttgggcgtggcagtcaccaatttt

SEQ ID NO: 3654 - RNA, 138 nt, synthetic construct
  misc_feature 1..138: note = Description of Artificial Sequence: Synthetic polynucleotide
  source 1..138: mol_type = other RNA
tttggtgactgccacgcccagttttagagctagaaatagcaagttaaaataaggctagtccgttatcaacttgaaaaagtggcaccgagtcggtgcgactgcggaggccagcagtgaacaccctttgggcgtggcagt

SEQ ID NO: 3655 - RNA, 138 nt, synthetic construct
  misc_feature 1..138: note = Description of Artificial Sequence: Synthetic polynucleotide
  source 1..138: mol_type = other RNA
gtttggtgactgccacgcccagttttagagctagaaatagcaagttaaaataaggctagtccgttatcaacttgaaaaagtggcaccgagtcggtgcggccagcagtgaacacccgttgggcgtggcagtcttttttt

SEQ ID NO: 3656 - RNA, 138 nt, synthetic construct
  misc_feature 1..138: note = Description of Artificial Sequence: Synthetic polynucleotide
  source 1..138: mol_type = other RNA
gtttggtgactgccacgcccagttttagagctagaaatagcaagttaaaataaggctagtccgttatcaacttgaaaaagtggcaccgagtcggtgcgaggccagcagtgaacacccgttgggcgtggcagttttttt

SEQ ID NO: 3657 - RNA, 138 nt, synthetic construct
  misc_feature 1..138: note = Description of Artificial Sequence: Synthetic polynucleotide
  source 1..138: mol_type = other RNA
tttggtgactgccacgcccagttttagagctagaaatagcaagttaaaataaggctagtccgttatcaacttgaaaaagtggcaccgagtcggtgcgactgcggaggccagcagtgaacacccattgggcgtggcagt

SEQ ID NO: 3658 - RNA, 138 nt, synthetic construct
  misc_feature 1..138: note = Description of Artificial Sequence: Synthetic polynucleotide
  source 1..138: mol_type = other RNA
gtttggtgactgccacgcccagttttagagctagaaatagcaagttaaaataaggctagtccgttatcaacttgaaaaagtggcaccgagtcggtgcggccagcagtgaacacccattgggcgtggcagtcttttttt

SEQ ID NO: 3659 - RNA, 138 nt, synthetic construct
  misc_feature 1..138: note = Description of Artificial Sequence: Synthetic polynucleotide
  source 1..138: mol_type = other RNA
tttggtgactgccacgcccagttttagagctagaaatagcaagttaaaataaggctagtccgttatcaacttgaaaaagtggcaccgagtcggtgctgcggaggccagcagtgaacaccctttgggcgtggcagtcac

SEQ ID NO: 3660 - RNA, 138 nt, synthetic construct
  misc_feature 1..138: note = Description of Artificial Sequence: Synthetic polynucleotide
  source 1..138: mol_type = other RNA
tttggtgactgccacgcccagttttagagctagaaatagcaagttaaaataaggctagtccgttatcaacttgaaaaagtggcaccgagtcggtgcgggactgcggaggccagcagtgaacacccgttgggcgtggca

SEQ ID NO: 3661 - RNA, 138 nt, synthetic construct
  misc_feature 1..138: note = Description of Artificial Sequence: Synthetic polynucleotide
  source 1..138: mol_type = other RNA
tttggtgactgccacgcccagttttagagctagaaatagcaagttaaaataaggctagtccgttatcaacttgaaaaagtggcaccgagtcggtgcactgcggaggccagcagtgaacaccctttgggcgtggcagtc

SEQ ID NO: 3662 - RNA, 138 nt, synthetic construct
  misc_feature 1..138: note = Description of Artificial Sequence: Synthetic polynucleotide
  source 1..138: mol_type = other RNA
gtttggtgactgccacgcccagttttagagctagaaatagcaagttaaaataaggctagtccgttatcaacttgaaaaagtggcaccgagtcggtgcagcagtgaacacccgttgggcgtggcagtcaccaatttttt

SEQ ID NO: 3663 - RNA, 138 nt, synthetic construct
  misc_feature 1..138: note = Description of Artificial Sequence: Synthetic polynucleotide
  source 1..138: mol_type = other RNA
gtttggtgactgccacgcccagttttagagctagaaatagcaagttaaaataaggctagtccgttatcaacttgaaaaagtggcaccgagtcggtgcaggccagcagtgaacaccctttgggcgtggcagtttttttt

SEQ ID NO: 3664 - RNA, 138 nt, synthetic construct
  misc_feature 1..138: note = Description of Artificial Sequence: Synthetic polynucleotide
  source 1..138: mol_type = other RNA
tttggtgactgccacgcccagttttagagctagaaatagcaagttaaaataaggctagtccgttatcaacttgaaaaagtggcaccgagtcggtgcactgcggaggccagcagtgaacacccgttgggcgtggcagtc

SEQ ID NO: 3665 - RNA, 138 nt, synthetic construct
  misc_feature 1..138: note = Description of Artificial Sequence: Synthetic polynucleotide
  source 1..138: mol_type = other RNA
gtttggtgactgccacgcccagttttagagctagaaatagcaagttaaaataaggctagtccgttatcaacttgaaaaagtggcaccgagtcggtgcggaggccagcagtgaacaccctttgggcgtggcattttttt

SEQ ID NO: 3666 - RNA, 138 nt, synthetic construct
  misc_feature 1..138: note = Description of Artificial Sequence: Synthetic polynucleotide
  source 1..138: mol_type = other RNA
gtttggtgactgccacgcccagttttagagctagaaatagcaagttaaaataaggctagtccgttatcaacttgaaaaagtggcaccgagtcggtgcagcagtgaacaccccttgggcgtggcagtcaccaatttttt

SEQ ID NO: 3667 - RNA, 138 nt, synthetic construct
  misc_feature 1..138: note = Description of Artificial Sequence: Synthetic polynucleotide
  source 1..138: mol_type = other RNA
gtttggtgactgccacgcccagttttagagctagaaatagcaagttaaaataaggctagtccgttatcaacttgaaaaagtggcaccgagtcggtgcggccagcagtgaacaccctttgggcgtggcagtcttttttt

SEQ ID NO: 3668 - RNA, 138 nt, synthetic construct
  misc_feature 1..138: note = Description of Artificial Sequence: Synthetic polynucleotide
  source 1..138: mol_type = other RNA
tttggtgactgccacgcccagttttagagctagaaatagcaagttaaaataaggctagtccgttatcaacttgaaaaagtggcaccgagtcggtgcgactgcggaggccagcagtgaacacccgttgggcgtggcagt

SEQ ID NO: 3669 - RNA, 138 nt, synthetic construct
  misc_feature 1..138: note = Description of Artificial Sequence: Synthetic polynucleotide
  source 1..138: mol_type = other RNA
tttggtgactgccacgcccagttttagagctagaaatagcaagttaaaataaggctagtccgttatcaacttgaaaaagtggcaccgagtcggtgcgactgcggaggccagcagtgaacaccccttgggcgtggcagt

SEQ ID NO: 3670 - RNA, 138 nt, synthetic construct
  misc_feature 1..138: note = Description of Artificial Sequence: Synthetic polynucleotide
  source 1..138: mol_type = other RNA
gtttggtgactgccacgcccagttttagagctagaaatagcaagttaaaataaggctagtccgttatcaacttgaaaaagtggcaccgagtcggtgcgaggccagcagtgaacaccctttgggcgtggcagttttttt

SEQ ID NO: 3671 - RNA, 138 nt, synthetic construct
  misc_feature 1..138: note = Description of Artificial Sequence: Synthetic polynucleotide
  source 1..138: mol_type = other RNA
gtttggtgactgccacgcccagttttagagctagaaatagcaagttaaaataaggctagtccgttatcaacttgaaaaagtggcaccgagtcggtgcgaggccagcagtgaacaccccttgggcgtggcagttttttt

SEQ ID NO: 3672 - RNA, 138 nt, synthetic construct
  misc_feature 1..138: note = Description of Artificial Sequence: Synthetic polynucleotide
  source 1..138: mol_type = other RNA
gtttggtgactgccacgcccagttttagagctagaaatagcaagttaaaataaggctagtccgttatcaacttgaaaaagtggcaccgagtcggtgcaggccagcagtgaacacccgttgggcgtggcagtttttttt

SEQ ID NO: 3673 - RNA, 138 nt, synthetic construct
  misc_feature 1..138: note = Description of Artificial Sequence: Synthetic polynucleotide
  source 1..138: mol_type = other RNA
tttggtgactgccacgcccagttttagagctagaaatagcaagttaaaataaggctagtccgttatcaacttgaaaaagtggcaccgagtcggtgcggactgcggaggccagcagtgaacacccgttgggcgtggcag

SEQ ID NO: 3674 - RNA, 139 nt, synthetic construct
  misc_feature 1..139: note = Description of Artificial Sequence: Synthetic polynucleotide
  source 1..139: mol_type = other RNA
tttggtgactgccacgcccagttttagagctagaaatagcaagttaaaataaggctagtccgttatcaacttgaaaaagtggcaccgagtcggtgctggggactgcggaggccagcagtgaacaccccttgggcgtggc

SEQ ID NO: 3675 - RNA, 139 nt, synthetic construct
  misc_feature 1..139: note = Description of Artificial Sequence: Synthetic polynucleotide
  source 1..139: mol_type = other RNA
gtttggtgactgccacgcccagttttagagctagaaatagcaagttaaaataaggctagtccgttatcaacttgaaaaagtggcaccgagtcggtgcgcggaggccagcagtgaacaccctttgggcgtggcttttttt

SEQ ID NO: 3676 - RNA, 139 nt, synthetic construct
  misc_feature 1..139: note = Description of Artificial Sequence: Synthetic polynucleotide
  source 1..139: mol_type = other RNA
gtttggtgactgccacgcccagttttagagctagaaatagcaagttaaaataaggctagtccgttatcaacttgaaaaagtggcaccgagtcggtgcggccagcagtgaacaccccttgggcgtggcagtcattttttt

SEQ ID NO: 3677 - RNA, 139 nt, synthetic construct
  misc_feature 1..139: note = Description of Artificial Sequence: Synthetic polynucleotide
  source 1..139: mol_type = other RNA
gtttggtgactgccacgcccagttttagagctagaaatagcaagttaaaataaggctagtccgttatcaacttgaaaaagtggcaccgagtcggtgcgaggccagcagtgaacaccccttgggcgtggcagtttttttt

SEQ ID NO: 3678 - RNA, 139 nt, synthetic construct
  misc_feature 1..139: note = Description of Artificial Sequence: Synthetic polynucleotide
  source 1..139: mol_type = other RNA
tttggtgactgccacgcccagttttagagctagaaatagcaagttaaaataaggctagtccgttatcaacttgaaaaagtggcaccgagtcggtgctggggactgcggaggccagcagtgaacaccctttgggcgtggc

SEQ ID NO: 3679 - RNA, 139 nt, synthetic construct
  misc_feature 1..139: note = Description of Artificial Sequence: Synthetic polynucleotide
  source 1..139: mol_type = other RNA
tttggtgactgccacgcccagttttagagctagaaatagcaagttaaaataaggctagtccgttatcaacttgaaaaagtggcaccgagtcggtgctgcggaggccagcagtgaacaccctttgggcgtggcagtcacc

SEQ ID NO: 3680 - RNA, 139 nt, synthetic construct
  misc_feature 1..139: note = Description of Artificial Sequence: Synthetic polynucleotide
  source 1..139: mol_type = other RNA
tttggtgactgccacgcccagttttagagctagaaatagcaagttaaaataaggctagtccgttatcaacttgaaaaagtggcaccgagtcggtgcggactgcggaggccagcagtgaacaccctttgggcgtggcagt

SEQ ID NO: 3681 - RNA, 139 nt, synthetic construct
  misc_feature 1..139: note = Description of Artificial Sequence: Synthetic polynucleotide
  source 1..139: mol_type = other RNA
tttggtgactgccacgcccagttttagagctagaaatagcaagttaaaataaggctagtccgttatcaacttgaaaaagtggcaccgagtcggtgcgactgcggaggccagcagtgaacacccgttgggcgtggcagtc

SEQ ID NO: 3682 - RNA, 139 nt, synthetic construct
  misc_feature 1..139: note = Description of Artificial Sequence: Synthetic polynucleotide
  source 1..139: mol_type = other RNA
gtttggtgactgccacgcccagttttagagctagaaatagcaagttaaaataaggctagtccgttatcaacttgaaaaagtggcaccgagtcggtgcggccagcagtgaacacccattgggcgtggcagtcattttttt

SEQ ID NO: 3683 - RNA, 139 nt, synthetic construct
  misc_feature 1..139: note = Description of Artificial Sequence: Synthetic polynucleotide
  source 1..139: mol_type = other RNA
gtttggtgactgccacgcccagttttagagctagaaatagcaagttaaaataaggctagtccgttatcaacttgaaaaagtggcaccgagtcggtgcggccagcagtgaacacccgttgggcgtggcagtcattttttt

SEQ ID NO: 3684 - RNA, 139 nt, synthetic construct
  misc_feature 1..139: note = Description of Artificial Sequence: Synthetic polynucleotide
  source 1..139: mol_type = other RNA
tttggtgactgccacgcccagttttagagctagaaatagcaagttaaaataaggctagtccgttatcaacttgaaaaagtggcaccgagtcggtgcgggactgcggaggccagcagtgaacacccattgggcgtggcag

SEQ ID NO: 3685 - RNA, 139 nt, synthetic construct
  misc_feature 1..139: note = Description of Artificial Sequence: Synthetic polynucleotide
  source 1..139: mol_type = other RNA
tttggtgactgccacgcccagttttagagctagaaatagcaagttaaaataaggctagtccgttatcaacttgaaaaagtggcaccgagtcggtgcgactgcggaggccagcagtgaacaccctttgggcgtggcagtc

SEQ ID NO: 3686 - RNA, 139 nt, synthetic construct
  misc_feature 1..139: note = Description of Artificial Sequence: Synthetic polynucleotide
  source 1..139: mol_type = other RNA
gtttggtgactgccacgcccagttttagagctagaaatagcaagttaaaataaggctagtccgttatcaacttgaaaaagtggcaccgagtcggtgcaggccagcagtgaacacccattgggcgtggcagtcttttttt

SEQ ID NO: 3687 - RNA, 139 nt, synthetic construct
  misc_feature 1..139: note = Description of Artificial Sequence: Synthetic polynucleotide
  source 1..139: mol_type = other RNA
tttggtgactgccacgcccagttttagagctagaaatagcaagttaaaataaggctagtccgttatcaacttgaaaaagtggcaccgagtcggtgcggactgcggaggccagcagtgaacacccattgggcgtggcagt

SEQ ID NO: 3688 - RNA, 139 nt, synthetic construct
  misc_feature 1..139: note = Description of Artificial Sequence: Synthetic polynucleotide
  source 1..139: mol_type = other RNA
tttggtgactgccacgcccagttttagagctagaaatagcaagttaaaataaggctagtccgttatcaacttgaaaaagtggcaccgagtcggtgcgactgcggaggccagcagtgaacaccccttgggcgtggcagtc

SEQ ID NO: 3689 - RNA, 139 nt, synthetic construct
  misc_feature 1..139: note = Description of Artificial Sequence: Synthetic polynucleotide
  source 1..139: mol_type = other RNA
gtttggtgactgccacgcccagttttagagctagaaatagcaagttaaaataaggctagtccgttatcaacttgaaaaagtggcaccgagtcggtgcggaggccagcagtgaacaccctttgggcgtggcagttttttt

SEQ ID NO: 3690 - RNA, 139 nt, synthetic construct
  misc_feature 1..139: note = Description of Artificial Sequence: Synthetic polynucleotide
  source 1..139: mol_type = other RNA
gtttggtgactgccacgcccagttttagagctagaaatagcaagttaaaataaggctagtccgttatcaacttgaaaaagtggcaccgagtcggtgcggaggccagcagtgaacacccgttgggcgtggcagttttttt

SEQ ID NO: 3691 - RNA, 139 nt, synthetic construct
  misc_feature 1..139: note = Description of Artificial Sequence: Synthetic polynucleotide
  source 1..139: mol_type = other RNA
gtttggtgactgccacgcccagttttagagctagaaatagcaagttaaaataaggctagtccgttatcaacttgaaaaagtggcaccgagtcggtgcgaggccagcagtgaacacccattgggcgtggcagtttttttt

SEQ ID NO: 3692 - RNA, 139 nt, synthetic construct
  misc_feature 1..139: note = Description of Artificial Sequence: Synthetic polynucleotide
  source 1..139: mol_type = other RNA
gtttggtgactgccacgcccagttttagagctagaaatagcaagttaaaataaggctagtccgttatcaacttgaaaaagtggcaccgagtcggtgcaggccagcagtgaacaccccttgggcgtggcagtcttttttt

SEQ ID NO: 3693 - RNA, 139 nt, synthetic construct
  misc_feature 1..139: note = Description of Artificial Sequence: Synthetic polynucleotide
  source 1..139: mol_type = other RNA
gtttggtgactgccacgcccagttttagagctagaaatagcaagttaaaataaggctagtccgttatcaacttgaaaaagtggcaccgagtcggtgcgcggaggccagcagtgaacacccattgggcgtggcttttttt

SEQ ID NO: 3694 - RNA, 139 nt, synthetic construct
  misc_feature 1..139: note = Description of Artificial Sequence: Synthetic polynucleotide
  source 1..139: mol_type = other RNA
gtttggtgactgccacgcccagttttagagctagaaatagcaagttaaaataaggctagtccgttatcaacttgaaaaagtggcaccgagtcggtgcgccagcagtgaacaccctttgggcgtggcagtcacttttttt

SEQ ID NO: 3695 - RNA, 139 nt, synthetic construct
  misc_feature 1..139: note = Description of Artificial Sequence: Synthetic polynucleotide
  source 1..139: mol_type = other RNA
gtttggtgactgccacgcccagttttagagctagaaatagcaagttaaaataaggctagtccgttatcaacttgaaaaagtggcaccgagtcggtgcgccagcagtgaacacccgttgggcgtggcagtcacttttttt

SEQ ID NO: 3696 - RNA, 139 nt, synthetic construct
  misc_feature 1..139: note = Description of Artificial Sequence: Synthetic polynucleotide
  source 1..139: mol_type = other RNA
gtttggtgactgccacgcccagttttagagctagaaatagcaagttaaaataaggctagtccgttatcaacttgaaaaagtggcaccgagtcggtgcgccagcagtgaacaccccttgggcgtggcagtcacttttttt

SEQ ID NO: 3697 - RNA, 139 nt, synthetic construct
  misc_feature 1..139: note = Description of Artificial Sequence: Synthetic polynucleotide
  source 1..139: mol_type = other RNA
tttggtgactgccacgcccagttttagagctagaaatagcaagttaaaataaggctagtccgttatcaacttgaaaaagtggcaccgagtcggtgctggggactgcggaggccagcagtgaacacccgttgggcgtggc

SEQ ID NO: 3698 - RNA, 139 nt, synthetic construct
  misc_feature 1..139: note = Description of Artificial Sequence: Synthetic polynucleotide
  source 1..139: mol_type = other RNA
gtttggtgactgccacgcccagttttagagctagaaatagcaagttaaaataaggctagtccgttatcaacttgaaaaagtggcaccgagtcggtgcgcggaggccagcagtgaacacccgttgggcgtggcttttttt

SEQ ID NO: 3699 - RNA, 139 nt, synthetic construct
  misc_feature 1..139: note = Description of Artificial Sequence: Synthetic polynucleotide
  source 1..139: mol_type = other RNA
tttggtgactgccacgcccagttttagagctagaaatagcaagttaaaataaggctagtccgttatcaacttgaaaaagtggcaccgagtcggtgcactgcggaggccagcagtgaacaccccttgggcgtggcagtca

SEQ ID NO: 3700 - RNA, 139 nt, synthetic construct
  misc_feature 1..139: note = Description of Artificial Sequence: Synthetic polynucleotide
  source 1..139: mol_type = other RNA
gtttggtgactgccacgcccagttttagagctagaaatagcaagttaaaataaggctagtccgttatcaacttgaaaaagtggcaccgagtcggtgcgccagcagtgaacacccattgggcgtggcagtcacttttttt

SEQ ID NO: 3701 - RNA, 139 nt, synthetic construct
  misc_feature 1..139: note = Description of Artificial Sequence: Synthetic polynucleotide
  source 1..139: mol_type = other RNA
gtttggtgactgccacgcccagttttagagctagaaatagcaagttaaaataaggctagtccgttatcaacttgaaaaagtggcaccgagtcggtgcgaggccagcagtgaacaccctttgggcgtggcagtttttttt

SEQ ID NO: 3702 - RNA, 139 nt, synthetic construct
  misc_feature 1..139: note = Description of Artificial Sequence: Synthetic polynucleotide
  source 1..139: mol_type = other RNA
tttggtgactgccacgcccagttttagagctagaaatagcaagttaaaataaggctagtccgttatcaacttgaaaaagtggcaccgagtcggtgctggggactgcggaggccagcagtgaacacccattgggcgtggc

SEQ ID NO: 3703 - RNA, 139 nt, synthetic construct
  misc_feature 1..139: note = Description of Artificial Sequence: Synthetic polynucleotide
  source 1..139: mol_type = other RNA
tttggtgactgccacgcccagttttagagctagaaatagcaagttaaaataaggctagtccgttatcaacttgaaaaagtggcaccgagtcggtgcggggactgcggaggccagcagtgaacaccctttgggcgtggca

SEQ ID NO: 3704 - RNA, 139 nt, synthetic construct
  misc_feature 1..139: note = Description of Artificial Sequence: Synthetic polynucleotide
  source 1..139: mol_type = other RNA
tttggtgactgccacgcccagttttagagctagaaatagcaagttaaaataaggctagtccgttatcaacttgaaaaagtggcaccgagtcggtgcggactgcggaggccagcagtgaacacccgttgggcgtggcagt

SEQ ID NO: 3705 - RNA, 139 nt, synthetic construct
  misc_feature 1..139: note = Description of Artificial Sequence: Synthetic polynucleotide
  source 1..139: mol_type = other RNA
tttggtgactgccacgcccagttttagagctagaaatagcaagttaaaataaggctagtccgttatcaacttgaaaaagtggcaccgagtcggtgcggggactgcggaggccagcagtgaacacccattgggcgtggca

SEQ ID NO: 3706 - RNA, 139 nt, synthetic construct
  misc_feature 1..139: note = Description of Artificial Sequence: Synthetic polynucleotide
  source 1..139: mol_type = other RNA
tttggtgactgccacgcccagttttagagctagaaatagcaagttaaaataaggctagtccgttatcaacttgaaaaagtggcaccgagtcggtgcgggactgcggaggccagcagtgaacaccctttgggcgtggcag

SEQ ID NO: 3707 - RNA, 139 nt, synthetic construct
  misc_feature 1..139: note = Description of Artificial Sequence: Synthetic polynucleotide
  source 1..139: mol_type = other RNA
gtttggtgactgccacgcccagttttagagctagaaatagcaagttaaaataaggctagtccgttatcaacttgaaaaagtggcaccgagtcggtgcgccagcagtgaacacccgttgggcgtggcagtcacctttttt

SEQ ID NO: 3708 - RNA, 139 nt, synthetic construct
  misc_feature 1..139: note = Description of Artificial Sequence: Synthetic polynucleotide
  source 1..139: mol_type = other RNA
tttggtgactgccacgcccagttttagagctagaaatagcaagttaaaataaggctagtccgttatcaacttgaaaaagtggcaccgagtcggtgctgcggaggccagcagtgaacaccccttgggcgtggcagtcacc

SEQ ID NO: 3709 - RNA, 139 nt, synthetic construct
  misc_feature 1..139: note = Description of Artificial Sequence: Synthetic polynucleotide
  source 1..139: mol_type = other RNA
gtttggtgactgccacgcccagttttagagctagaaatagcaagttaaaataaggctagtccgttatcaacttgaaaaagtggcaccgagtcggtgcggaggccagcagtgaacaccccttgggcgtggcagttttttt

SEQ ID NO: 3710 - RNA, 139 nt, synthetic construct
  misc_feature 1..139: note = Description of Artificial Sequence: Synthetic polynucleotide
  source 1..139: mol_type = other RNA
tttggtgactgccacgcccagttttagagctagaaatagcaagttaaaataaggctagtccgttatcaacttgaaaaagtggcaccgagtcggtgcgggactgcggaggccagcagtgaacaccccttgggcgtggcag

SEQ ID NO: 3711 - RNA, 139 nt, synthetic construct
  misc_feature 1..139: note = Description of Artificial Sequence: Synthetic polynucleotide
  source 1..139: mol_type = other RNA
tttggtgactgccacgcccagttttagagctagaaatagcaagttaaaataaggctagtccgttatcaacttgaaaaagtggcaccgagtcggtgcgactgcggaggccagcagtgaacacccattgggcgtggcagtc

SEQ ID NO: 3712 - RNA, 139 nt, synthetic construct
  misc_feature 1..139: note = Description of Artificial Sequence: Synthetic polynucleotide
  source 1..139: mol_type = other RNA
tttggtgactgccacgcccagttttagagctagaaatagcaagttaaaataaggctagtccgttatcaacttgaaaaagtggcaccgagtcggtgctgcggaggccagcagtgaacacccgttgggcgtggcagtcacc

SEQ ID NO: 3713 - RNA, 139 nt, synthetic construct
  misc_feature 1..139: note = Description of Artificial Sequence: Synthetic polynucleotide
  source 1..139: mol_type = other RNA
gtttggtgactgccacgcccagttttagagctagaaatagcaagttaaaataaggctagtccgttatcaacttgaaaaagtggcaccgagtcggtgcaggccagcagtgaacaccctttgggcgtggcagtcttttttt

SEQ ID NO: 3714 - RNA, 139 nt, synthetic construct
  misc_feature 1..139: note = Description of Artificial Sequence: Synthetic polynucleotide
  source 1..139: mol_type = other RNA
tttggtgactgccacgcccagttttagagctagaaatagcaagttaaaataaggctagtccgttatcaacttgaaaaagtggcaccgagtcggtgcgggactgcggaggccagcagtgaacacccgttgggcgtggcag

SEQ ID NO: 3715 - RNA, 139 nt, synthetic construct
  misc_feature 1..139: note = Description of Artificial Sequence: Synthetic polynucleotide
  source 1..139: mol_type = other RNA
tttggtgactgccacgcccagttttagagctagaaatagcaagttaaaataaggctagtccgttatcaacttgaaaaagtggcaccgagtcggtgcactgcggaggccagcagtgaacacccgttgggcgtggcagtca

SEQ ID NO: 3716 - RNA, 139 nt, synthetic construct
  misc_feature 1..139: note = Description of Artificial Sequence: Synthetic polynucleotide
  source 1..139: mol_type = other RNA
gtttggtgactgccacgcccagttttagagctagaaatagcaagttaaaataaggctagtccgttatcaacttgaaaaagtggcaccgagtcggtgcgaggccagcagtgaacacccgttgggcgtggcagtttttttt

SEQ ID NO: 3717 - RNA, 139 nt, synthetic construct
  misc_feature 1..139: note = Description of Artificial Sequence: Synthetic polynucleotide
  source 1..139: mol_type = other RNA
gtttggtgactgccacgcccagttttagagctagaaatagcaagttaaaataaggctagtccgttatcaacttgaaaaagtggcaccgagtcggtgcggccagcagtgaacaccctttgggcgtggcagtcattttttt

SEQ ID NO: 3718 - RNA, 139 nt, synthetic construct
  misc_feature 1..139: note = Description of Artificial Sequence: Synthetic polynucleotide
  source 1..139: mol_type = other RNA
gtttggtgactgccacgcccagttttagagctagaaatagcaagttaaaataaggctagtccgttatcaacttgaaaaagtggcaccgagtcggtgcggaggccagcagtgaacacccattgggcgtggcagttttttt

SEQ ID NO: 3719 - RNA, 139 nt, synthetic construct
  misc_feature 1..139: note = Description of Artificial Sequence: Synthetic polynucleotide
  source 1..139: mol_type = other RNA
gtttggtgactgccacgcccagttttagagctagaaatagcaagttaaaataaggctagtccgttatcaacttgaaaaagtggcaccgagtcggtgcgccagcagtgaacacccattgggcgtggcagtcacctttttt

SEQ ID NO: 3720 - RNA, 139 nt, synthetic construct
  misc_feature 1..139: note = Description of Artificial Sequence: Synthetic polynucleotide
  source 1..139: mol_type = other RNA
gtttggtgactgccacgcccagttttagagctagaaatagcaagttaaaataaggctagtccgttatcaacttgaaaaagtggcaccgagtcggtgcgccagcagtgaacaccctttgggcgtggcagtcacctttttt

SEQ ID NO: 3721 - RNA, 139 nt, synthetic construct
  misc_feature 1..139: note = Description of Artificial Sequence: Synthetic polynucleotide
  source 1..139: mol_type = other RNA
tttggtgactgccacgcccagttttagagctagaaatagcaagttaaaataaggctagtccgttatcaacttgaaaaagtggcaccgagtcggtgcggggactgcggaggccagcagtgaacaccccttgggcgtggca

SEQ ID NO: 3722 - RNA, 139 nt, synthetic construct
  misc_feature 1..139: note = Description of Artificial Sequence: Synthetic polynucleotide
  source 1..139: mol_type = other RNA
tttggtgactgccacgcccagttttagagctagaaatagcaagttaaaataaggctagtccgttatcaacttgaaaaagtggcaccgagtcggtgcactgcggaggccagcagtgaacacccattgggcgtggcagtca

SEQ ID NO: 3723 - RNA, 139 nt, synthetic construct
  misc_feature 1..139: note = Description of Artificial Sequence: Synthetic polynucleotide
  source 1..139: mol_type = other RNA
gtttggtgactgccacgcccagttttagagctagaaatagcaagttaaaataaggctagtccgttatcaacttgaaaaagtggcaccgagtcggtgcaggccagcagtgaacacccgttgggcgtggcagtcttttttt

SEQ ID NO: 3724 - RNA, 139 nt, synthetic construct
  misc_feature 1..139: note = Description of Artificial Sequence: Synthetic polynucleotide
  source 1..139: mol_type = other RNA
tttggtgactgccacgcccagttttagagctagaaatagcaagttaaaataaggctagtccgttatcaacttgaaaaagtggcaccgagtcggtgcggactgcggaggccagcagtgaacaccccttgggcgtggcagt

SEQ ID NO: 3725 - RNA, 139 nt, synthetic construct
  misc_feature 1..139: note = Description of Artificial Sequence: Synthetic polynucleotide
  source 1..139: mol_type = other RNA
tttggtgactgccacgcccagttttagagctagaaatagcaagttaaaataaggctagtccgttatcaacttgaaaaagtggcaccgagtcggtgctgcggaggccagcagtgaacacccattgggcgtggcagtcacc

SEQ ID NO: 3726 - RNA, 139 nt, synthetic construct
  misc_feature 1..139: note = Description of Artificial Sequence: Synthetic polynucleotide
  source 1..139: mol_type = other RNA
gtttggtgactgccacgcccagttttagagctagaaatagcaagttaaaataaggctagtccgttatcaacttgaaaaagtggcaccgagtcggtgcgccagcagtgaacaccccttgggcgtggcagtcacctttttt

SEQ ID NO: 3727 - RNA, 139 nt, synthetic construct
  misc_feature 1..139: note = Description of Artificial Sequence: Synthetic polynucleotide
  source 1..139: mol_type = other RNA
gtttggtgactgccacgcccagttttagagctagaaatagcaagttaaaataaggctagtccgttatcaacttgaaaaagtggcaccgagtcggtgcgcggaggccagcagtgaacaccccttgggcgtggcttttttt

SEQ ID NO: 3728 - RNA, 139 nt, synthetic construct
  misc_feature 1..139: note = Description of Artificial Sequence: Synthetic polynucleotide
  source 1..139: mol_type = other RNA
tttggtgactgccacgcccagttttagagctagaaatagcaagttaaaataaggctagtccgttatcaacttgaaaaagtggcaccgagtcggtgcggggactgcggaggccagcagtgaacacccgttgggcgtggca

SEQ ID NO: 3729 - RNA, 139 nt, synthetic construct
  misc_feature 1..139: note = Description of Artificial Sequence: Synthetic polynucleotide
  source 1..139: mol_type = other RNA
tttggtgactgccacgcccagttttagagctagaaatagcaagttaaaataaggctagtccgttatcaacttgaaaaagtggcaccgagtcggtgcactgcggaggccagcagtgaacaccctttgggcgtggcagtca

SEQ ID NO: 3730 - RNA, 140 nt, synthetic construct
  misc_feature 1..140: note = Description of Artificial Sequence: Synthetic polynucleotide
  source 1..140: mol_type = other RNA
tttggtgactgccacgcccagttttagagctagaaatagcaagttaaaataaggctagtccgttatcaacttgaaaaagtggcaccgagtcggtgcggactgcggaggccagcagtgaacaccctttgggcgtggcagtc

SEQ ID NO: 3731 - RNA, 140 nt, synthetic construct
  misc_feature 1..140: note = Description of Artificial Sequence: Synthetic polynucleotide
  source 1..140: mol_type = other RNA
tttggtgactgccacgcccagttttagagctagaaatagcaagttaaaataaggctagtccgttatcaacttgaaaaagtggcaccgagtcggtgcgactgcggaggccagcagtgaacaccccttgggcgtggcagtca

SEQ ID NO: 3732 - RNA, 140 nt, synthetic construct
  misc_feature 1..140: note = Description of Artificial Sequence: Synthetic polynucleotide
  source 1..140: mol_type = other RNA
tttggtgactgccacgcccagttttagagctagaaatagcaagttaaaataaggctagtccgttatcaacttgaaaaagtggcaccgagtcggtgcggactgcggaggccagcagtgaacaccccttgggcgtggcagtc

SEQ ID NO: 3733 - RNA, 140 nt, synthetic construct
  misc_feature 1..140: note = Description of Artificial Sequence: Synthetic polynucleotide
  source 1..140: mol_type = other RNA
tttggtgactgccacgcccagttttagagctagaaatagcaagttaaaataaggctagtccgttatcaacttgaaaaagtggcaccgagtcggtgcactgcggaggccagcagtgaacacccgttgggcgtggcagtcac

SEQ ID NO: 3734 - RNA, 140 nt, synthetic construct
  misc_feature 1..140: note = Description of Artificial Sequence: Synthetic polynucleotide
  source 1..140: mol_type = other RNA
tttggtgactgccacgcccagttttagagctagaaatagcaagttaaaataaggctagtccgttatcaacttgaaaaagtggcaccgagtcggtgcggggactgcggaggccagcagtgaacacccgttgggcgtggcag

SEQ ID NO: 3735 - RNA, 140 nt, synthetic construct
  misc_feature 1..140: note = Description of Artificial Sequence: Synthetic polynucleotide
  source 1..140: mol_type = other RNA
tttggtgactgccacgcccagttttagagctagaaatagcaagttaaaataaggctagtccgttatcaacttgaaaaagtggcaccgagtcggtgcgactgcggaggccagcagtgaacaccctttgggcgtggcagtca

SEQ ID NO: 3736 - RNA, 140 nt, synthetic construct
  misc_feature 1..140: note = Description of Artificial Sequence: Synthetic polynucleotide
  source 1..140: mol_type = other RNA
tttggtgactgccacgcccagttttagagctagaaatagcaagttaaaataaggctagtccgttatcaacttgaaaaagtggcaccgagtcggtgcgtggggactgcggaggccagcagtgaacaccccttgggcgtggc

SEQ ID NO: 3737 - RNA, 140 nt, synthetic construct
  misc_feature 1..140: note = Description of Artificial Sequence: Synthetic polynucleotide
  source 1..140: mol_type = other RNA
tttggtgactgccacgcccagttttagagctagaaatagcaagttaaaataaggctagtccgttatcaacttgaaaaagtggcaccgagtcggtgcggggactgcggaggccagcagtgaacacccattgggcgtggcag

SEQ ID NO: 3738 - RNA, 140 nt, synthetic construct
  misc_feature 1..140: note = Description of Artificial Sequence: Synthetic polynucleotide
  source 1..140: mol_type = other RNA
gtttggtgactgccacgcccagttttagagctagaaatagcaagttaaaataaggctagtccgttatcaacttgaaaaagtggcaccgagtcggtgcgaggccagcagtgaacacccattgggcgtggcagtcttttttt

SEQ ID NO: 3739 - RNA, 140 nt, synthetic construct
  misc_feature 1..140: note = Description of Artificial Sequence: Synthetic polynucleotide
  source 1..140: mol_type = other RNA
tttggtgactgccacgcccagttttagagctagaaatagcaagttaaaataaggctagtccgttatcaacttgaaaaagtggcaccgagtcggtgcgtggggactgcggaggccagcagtgaacacccattgggcgtggc

SEQ ID NO: 3740 - RNA, 140 nt, synthetic construct
  misc_feature 1..140: note = Description of Artificial Sequence: Synthetic polynucleotide
  source 1..140: mol_type = other RNA
tttggtgactgccacgcccagttttagagctagaaatagcaagttaaaataaggctagtccgttatcaacttgaaaaagtggcaccgagtcggtgcgactgcggaggccagcagtgaacacccattgggcgtggcagtca

SEQ ID NO: 3741 - RNA, 140 nt, synthetic construct
  misc_feature 1..140: note = Description of Artificial Sequence: Synthetic polynucleotide
  source 1..140: mol_type = other RNA
tttggtgactgccacgcccagttttagagctagaaatagcaagttaaaataaggctagtccgttatcaacttgaaaaagtggcaccgagtcggtgctggggactgcggaggccagcagtgaacaccccttgggcgtggca

SEQ ID NO: 3742 - RNA, 140 nt, synthetic construct
  misc_feature 1..140: note = Description of Artificial Sequence: Synthetic polynucleotide
  source 1..140: mol_type = other RNA
gtttggtgactgccacgcccagttttagagctagaaatagcaagttaaaataaggctagtccgttatcaacttgaaaaagtggcaccgagtcggtgctgcggaggccagcagtgaacaccctttgggcgtggcttttttt

SEQ ID NO: 3743 - RNA, 140 nt, synthetic construct
  misc_feature 1..140: note = Description of Artificial Sequence: Synthetic polynucleotide
  source 1..140: mol_type = other RNA
tttggtgactgccacgcccagttttagagctagaaatagcaagttaaaataaggctagtccgttatcaacttgaaaaagtggcaccgagtcggtgcgtggggactgcggaggccagcagtgaacacccgttgggcgtggc

SEQ ID NO: 3744 - RNA, 140 nt, synthetic construct
  misc_feature 1..140: note = Description of Artificial Sequence: Synthetic polynucleotide
  source 1..140: mol_type = other RNA
tttggtgactgccacgcccagttttagagctagaaatagcaagttaaaataaggctagtccgttatcaacttgaaaaagtggcaccgagtcggtgcgggactgcggaggccagcagtgaacaccctttgggcgtggcagt

SEQ ID NO: 3745 - RNA, 140 nt, synthetic construct
  misc_feature 1..140: note = Description of Artificial Sequence: Synthetic polynucleotide
  source 1..140: mol_type = other RNA
gtttggtgactgccacgcccagttttagagctagaaatagcaagttaaaataaggctagtccgttatcaacttgaaaaagtggcaccgagtcggtgctgcggaggccagcagtgaacacccattgggcgtggcttttttt

SEQ ID NO: 3746 - RNA, 140 nt, synthetic construct
  misc_feature 1..140: note = Description of Artificial Sequence: Synthetic polynucleotide
  source 1..140: mol_type = other RNA
tttggtgactgccacgcccagttttagagctagaaatagcaagttaaaataaggctagtccgttatcaacttgaaaaagtggcaccgagtcggtgcgtggggactgcggaggccagcagtgaacaccctttgggcgtggc

SEQ ID NO: 3747 - RNA, 140 nt, synthetic construct
  misc_feature 1..140: note = Description of Artificial Sequence: Synthetic polynucleotide
  source 1..140: mol_type = other RNA
gtttggtgactgccacgcccagttttagagctagaaatagcaagttaaaataaggctagtccgttatcaacttgaaaaagtggcaccgagtcggtgcgccagcagtgaacacccgttgggcgtggcagtcaccttttttt

SEQ ID NO: 3748 - RNA, 140 nt, synthetic construct
  misc_feature 1..140: note = Description of Artificial Sequence: Synthetic polynucleotide
  source 1..140: mol_type = other RNA
tttggtgactgccacgcccagttttagagctagaaatagcaagttaaaataaggctagtccgttatcaacttgaaaaagtggcaccgagtcggtgctggggactgcggaggccagcagtgaacacccgttgggcgtggca

SEQ ID NO: 3749 - RNA, 140 nt, synthetic construct
  misc_feature 1..140: note = Description of Artificial Sequence: Synthetic polynucleotide
  source 1..140: mol_type = other RNA
gtttggtgactgccacgcccagttttagagctagaaatagcaagttaaaataaggctagtccgttatcaacttgaaaaagtggcaccgagtcggtgcgcggaggccagcagtgaacaccccttgggcgtggcattttttt

SEQ ID NO: 3750 - RNA, 140 nt, synthetic construct
  misc_feature 1..140: note = Description of Artificial Sequence: Synthetic polynucleotide
  source 1..140: mol_type = other RNA
gtttggtgactgccacgcccagttttagagctagaaatagcaagttaaaataaggctagtccgttatcaacttgaaaaagtggcaccgagtcggtgcggaggccagcagtgaacaccccttgggcgtggcagtttttttt

SEQ ID NO: 3751 - RNA, 140 nt, synthetic construct
  misc_feature 1..140: note = Description of Artificial Sequence: Synthetic polynucleotide
  source 1..140: mol_type = other RNA
gtttggtgactgccacgcccagttttagagctagaaatagcaagttaaaataaggctagtccgttatcaacttgaaaaagtggcaccgagtcggtgcaggccagcagtgaacaccctttgggcgtggcagtcattttttt

SEQ ID NO: 3752 - RNA, 140 nt, synthetic construct
  misc_feature 1..140: note = Description of Artificial Sequence: Synthetic polynucleotide
  source 1..140: mol_type = other RNA
gtttggtgactgccacgcccagttttagagctagaaatagcaagttaaaataaggctagtccgttatcaacttgaaaaagtggcaccgagtcggtgcaggccagcagtgaacaccccttgggcgtggcagtcattttttt

SEQ ID NO: 3753 - RNA, 140 nt, synthetic construct
  misc_feature 1..140: note = Description of Artificial Sequence: Synthetic polynucleotide
  source 1..140: mol_type = other RNA
gtttggtgactgccacgcccagttttagagctagaaatagcaagttaaaataaggctagtccgttatcaacttgaaaaagtggcaccgagtcggtgcaggccagcagtgaacacccattgggcgtggcagtcattttttt

SEQ ID NO: 3754 - RNA, 140 nt, synthetic construct
  misc_feature 1..140: note = Description of Artificial Sequence: Synthetic polynucleotide
  source 1..140: mol_type = other RNA
gtttggtgactgccacgcccagttttagagctagaaatagcaagttaaaataaggctagtccgttatcaacttgaaaaagtggcaccgagtcggtgcgaggccagcagtgaacaccccttgggcgtggcagtcttttttt

SEQ ID NO: 3755 - RNA, 140 nt, synthetic construct
  misc_feature 1..140: note = Description of Artificial Sequence: Synthetic polynucleotide
  source 1..140: mol_type = other RNA
tttggtgactgccacgcccagttttagagctagaaatagcaagttaaaataaggctagtccgttatcaacttgaaaaagtggcaccgagtcggtgcggactgcggaggccagcagtgaacacccattgggcgtggcagtc

SEQ ID NO: 3756 - RNA, 140 nt, synthetic construct
  misc_feature 1..140: note = Description of Artificial Sequence: Synthetic polynucleotide
  source 1..140: mol_type = other RNA
gtttggtgactgccacgcccagttttagagctagaaatagcaagttaaaataaggctagtccgttatcaacttgaaaaagtggcaccgagtcggtgcgcggaggccagcagtgaacacccattgggcgtggcattttttt

SEQ ID NO: 3757 - RNA, 140 nt, synthetic construct
  misc_feature 1..140: note = Description of Artificial Sequence: Synthetic polynucleotide
  source 1..140: mol_type = other RNA
gtttggtgactgccacgcccagttttagagctagaaatagcaagttaaaataaggctagtccgttatcaacttgaaaaagtggcaccgagtcggtgcgccagcagtgaacaccctttgggcgtggcagtcaccttttttt

SEQ ID NO: 3758 - RNA, 140 nt, synthetic construct
  misc_feature 1..140: note = Description of Artificial Sequence: Synthetic polynucleotide
  source 1..140: mol_type = other RNA
gtttggtgactgccacgcccagttttagagctagaaatagcaagttaaaataaggctagtccgttatcaacttgaaaaagtggcaccgagtcggtgcgcggaggccagcagtgaacacccgttgggcgtggcattttttt

SEQ ID NO: 3759 - RNA, 140 nt, synthetic construct
  misc_feature 1..140: note = Description of Artificial Sequence: Synthetic polynucleotide
  source 1..140: mol_type = other RNA
gtttggtgactgccacgcccagttttagagctagaaatagcaagttaaaataaggctagtccgttatcaacttgaaaaagtggcaccgagtcggtgctgcggaggccagcagtgaacaccccttgggcgtggcttttttt

SEQ ID NO: 3760 - RNA, 140 nt, synthetic construct
  misc_feature 1..140: note = Description of Artificial Sequence: Synthetic polynucleotide
  source 1..140: mol_type = other RNA
gtttggtgactgccacgcccagttttagagctagaaatagcaagttaaaataaggctagtccgttatcaacttgaaaaagtggcaccgagtcggtgcgccagcagtgaacacccattgggcgtggcagtcaccttttttt

SEQ ID NO: 3761 - RNA, 140 nt, synthetic construct
  misc_feature 1..140: note = Description of Artificial Sequence: Synthetic polynucleotide
  source 1..140: mol_type = other RNA
tttggtgactgccacgcccagttttagagctagaaatagcaagttaaaataaggctagtccgttatcaacttgaaaaagtggcaccgagtcggtgcgactgcggaggccagcagtgaacacccgttgggcgtggcagtca

SEQ ID NO: 3762 - RNA, 140 nt, synthetic construct
  misc_feature 1..140: note = Description of Artificial Sequence: Synthetic polynucleotide
  source 1..140: mol_type = other RNA
gtttggtgactgccacgcccagttttagagctagaaatagcaagttaaaataaggctagtccgttatcaacttgaaaaagtggcaccgagtcggtgcgaggccagcagtgaacacccgttgggcgtggcagtcttttttt

SEQ ID NO: 3763 - RNA, 140 nt, synthetic construct
  misc_feature 1..140: note = Description of Artificial Sequence: Synthetic polynucleotide
  source 1..140: mol_type = other RNA
gtttggtgactgccacgcccagttttagagctagaaatagcaagttaaaataaggctagtccgttatcaacttgaaaaagtggcaccgagtcggtgcggccagcagtgaacaccctttgggcgtggcagtcacttttttt

SEQ ID NO: 3764 - RNA, 140 nt, synthetic construct
  misc_feature 1..140: note = Description of Artificial Sequence: Synthetic polynucleotide
  source 1..140: mol_type = other RNA
gtttggtgactgccacgcccagttttagagctagaaatagcaagttaaaataaggctagtccgttatcaacttgaaaaagtggcaccgagtcggtgcggccagcagtgaacacccgttgggcgtggcagtcacttttttt

SEQ ID NO: 3765 - RNA, 140 nt, synthetic construct
  misc_feature 1..140: note = Description of Artificial Sequence: Synthetic polynucleotide
  source 1..140: mol_type = other RNA
gtttggtgactgccacgcccagttttagagctagaaatagcaagttaaaataaggctagtccgttatcaacttgaaaaagtggcaccgagtcggtgcggccagcagtgaacaccccttgggcgtggcagtcacttttttt

SEQ ID NO: 3766 - RNA, 140 nt, synthetic construct
  misc_feature 1..140: note = Description of Artificial Sequence: Synthetic polynucleotide
  source 1..140: mol_type = other RNA
gtttggtgactgccacgcccagttttagagctagaaatagcaagttaaaataaggctagtccgttatcaacttgaaaaagtggcaccgagtcggtgcaggccagcagtgaacacccgttgggcgtggcagtcattttttt

SEQ ID NO: 3767 - RNA, 140 nt, synthetic construct
  misc_feature 1..140: note = Description of Artificial Sequence: Synthetic polynucleotide
  source 1..140: mol_type = other RNA
gtttggtgactgccacgcccagttttagagctagaaatagcaagttaaaataaggctagtccgttatcaacttgaaaaagtggcaccgagtcggtgcggccagcagtgaacacccattgggcgtggcagtcacttttttt

SEQ ID NO: 3768 - RNA, 140 nt, synthetic construct
  misc_feature 1..140: note = Description of Artificial Sequence: Synthetic polynucleotide
  source 1..140: mol_type = other RNA
gtttggtgactgccacgcccagttttagagctagaaatagcaagttaaaataaggctagtccgttatcaacttgaaaaagtggcaccgagtcggtgcggaggccagcagtgaacaccctttgggcgtggcagtttttttt

SEQ ID NO: 3769 - RNA, 140 nt, synthetic construct
  misc_feature 1..140: note = Description of Artificial Sequence: Synthetic polynucleotide
  source 1..140: mol_type = other RNA
gtttggtgactgccacgcccagttttagagctagaaatagcaagttaaaataaggctagtccgttatcaacttgaaaaagtggcaccgagtcggtgcggaggccagcagtgaacacccgttgggcgtggcagtttttttt

SEQ ID NO: 3770 - RNA, 140 nt, synthetic construct
  misc_feature 1..140: note = Description of Artificial Sequence: Synthetic polynucleotide
  source 1..140: mol_type = other RNA
tttggtgactgccacgcccagttttagagctagaaatagcaagttaaaataaggctagtccgttatcaacttgaaaaagtggcaccgagtcggtgctggggactgcggaggccagcagtgaacacccattgggcgtggca

SEQ ID NO: 3771 - RNA, 140 nt, synthetic construct
  misc_feature 1..140: note = Description of Artificial Sequence: Synthetic polynucleotide
  source 1..140: mol_type = other RNA
tttggtgactgccacgcccagttttagagctagaaatagcaagttaaaataaggctagtccgttatcaacttgaaaaagtggcaccgagtcggtgcgggactgcggaggccagcagtgaacacccattgggcgtggcagt

SEQ ID NO: 3772 - RNA, 140 nt, synthetic construct
  misc_feature 1..140: note = Description of Artificial Sequence: Synthetic polynucleotide
  source 1..140: mol_type = other RNA
gtttggtgactgccacgcccagttttagagctagaaatagcaagttaaaataaggctagtccgttatcaacttgaaaaagtggcaccgagtcggtgctgcggaggccagcagtgaacacccgttgggcgtggcttttttt

SEQ ID NO: 3773 - RNA, 140 nt, synthetic construct
  misc_feature 1..140: note = Description of Artificial Sequence: Synthetic polynucleotide
  source 1..140: mol_type = other RNA
tttggtgactgccacgcccagttttagagctagaaatagcaagttaaaataaggctagtccgttatcaacttgaaaaagtggcaccgagtcggtgcgggactgcggaggccagcagtgaacacccgttgggcgtggcagt

SEQ ID NO: 3774 - RNA, 140 nt, synthetic construct
  misc_feature 1..140: note = Description of Artificial Sequence: Synthetic polynucleotide
  source 1..140: mol_type = other RNA
tttggtgactgccacgcccagttttagagctagaaatagcaagttaaaataaggctagtccgttatcaacttgaaaaagtggcaccgagtcggtgcactgcggaggccagcagtgaacaccccttgggcgtggcagtcac

SEQ ID NO: 3775 - RNA, 140 nt, synthetic construct
  misc_feature 1..140: note = Description of Artificial Sequence: Synthetic polynucleotide
  source 1..140: mol_type = other RNA
gtttggtgactgccacgcccagttttagagctagaaatagcaagttaaaataaggctagtccgttatcaacttgaaaaagtggcaccgagtcggtgcgcggaggccagcagtgaacaccctttgggcgtggcattttttt

SEQ ID NO: 3776 - RNA, 140 nt, synthetic construct
  misc_feature 1..140: note = Description of Artificial Sequence: Synthetic polynucleotide
  source 1..140: mol_type = other RNA
tttggtgactgccacgcccagttttagagctagaaatagcaagttaaaataaggctagtccgttatcaacttgaaaaagtggcaccgagtcggtgcactgcggaggccagcagtgaacacccattgggcgtggcagtcac

SEQ ID NO: 3777 - RNA, 140 nt, synthetic construct
  misc_feature 1..140: note = Description of Artificial Sequence: Synthetic polynucleotide
  source 1..140: mol_type = other RNA
gtttggtgactgccacgcccagttttagagctagaaatagcaagttaaaataaggctagtccgttatcaacttgaaaaagtggcaccgagtcggtgcgccagcagtgaacaccccttgggcgtggcagtcaccttttttt

SEQ ID NO: 3778 - RNA, 140 nt, synthetic construct
  misc_feature 1..140: note = Description of Artificial Sequence: Synthetic polynucleotide
  source 1..140: mol_type = other RNA
tttggtgactgccacgcccagttttagagctagaaatagcaagttaaaataaggctagtccgttatcaacttgaaaaagtggcaccgagtcggtgcggactgcggaggccagcagtgaacacccgttgggcgtggcagtc

SEQ ID NO: 3779 - RNA, 140 nt, synthetic construct
  misc_feature 1..140: note = Description of Artificial Sequence: Synthetic polynucleotide
  source 1..140: mol_type = other RNA
tttggtgactgccacgcccagttttagagctagaaatagcaagttaaaataaggctagtccgttatcaacttgaaaaagtggcaccgagtcggtgcggggactgcggaggccagcagtgaacaccccttgggcgtggcag

SEQ ID NO: 3780 - RNA, 140 nt, synthetic construct
  misc_feature 1..140: note = Description of Artificial Sequence: Synthetic polynucleotide
  source 1..140: mol_type = other RNA
gtttggtgactgccacgcccagttttagagctagaaatagcaagttaaaataaggctagtccgttatcaacttgaaaaagtggcaccgagtcggtgcgaggccagcagtgaacaccctttgggcgtggcagtcttttttt

SEQ ID NO: 3781 - RNA, 140 nt, synthetic construct
  misc_feature 1..140: note = Description of Artificial Sequence: Synthetic polynucleotide
  source 1..140: mol_type = other RNA
tttggtgactgccacgcccagttttagagctagaaatagcaagttaaaataaggctagtccgttatcaacttgaaaaagtggcaccgagtcggtgcgggactgcggaggccagcagtgaacaccccttgggcgtggcagt

SEQ ID NO: 3782 - RNA, 140 nt, synthetic construct
  misc_feature 1..140: note = Description of Artificial Sequence: Synthetic polynucleotide
  source 1..140: mol_type = other RNA
tttggtgactgccacgcccagttttagagctagaaatagcaagttaaaataaggctagtccgttatcaacttgaaaaagtggcaccgagtcggtgcactgcggaggccagcagtgaacaccctttgggcgtggcagtcac

SEQ ID NO: 3783 - RNA, 140 nt, synthetic construct
  misc_feature 1..140: note = Description of Artificial Sequence: Synthetic polynucleotide
  source 1..140: mol_type = other RNA
gtttggtgactgccacgcccagttttagagctagaaatagcaagttaaaataaggctagtccgttatcaacttgaaaaagtggcaccgagtcggtgcggaggccagcagtgaacacccattgggcgtggcagtttttttt

SEQ ID NO: 3784 - RNA, 140 nt, synthetic construct
  misc_feature 1..140: note = Description of Artificial Sequence: Synthetic polynucleotide
  source 1..140: mol_type = other RNA
tttggtgactgccacgcccagttttagagctagaaatagcaagttaaaataaggctagtccgttatcaacttgaaaaagtggcaccgagtcggtgctggggactgcggaggccagcagtgaacaccctttgggcgtggca

SEQ ID NO: 3785 - RNA, 140 nt, synthetic construct
  misc_feature 1..140: note = Description of Artificial Sequence: Synthetic polynucleotide
  source 1..140: mol_type = other RNA
tttggtgactgccacgcccagttttagagctagaaatagcaagttaaaataaggctagtccgttatcaacttgaaaaagtggcaccgagtcggtgcggggactgcggaggccagcagtgaacaccctttgggcgtggcag

SEQ ID NO: 3786 - RNA, 141 nt, synthetic construct
  misc_feature 1..141: note = Description of Artificial Sequence: Synthetic polynucleotide
  source 1..141: mol_type = other RNA
gtttggtgactgccacgcccagttttagagctagaaatagcaagttaaaataaggctagtccgttatcaacttgaaaaagtggcaccgagtcggtgcaggccagcagtgaacacccgttgggcgtggcagtcacttttttt

SEQ ID NO: 3787 - RNA, 141 nt, synthetic construct
  misc_feature 1..141: note = Description of Artificial Sequence: Synthetic polynucleotide
  source 1..141: mol_type = other RNA
gtttggtgactgccacgcccagttttagagctagaaatagcaagttaaaataaggctagtccgttatcaacttgaaaaagtggcaccgagtcggtgcgcggaggccagcagtgaacacccattgggcgtggcagttttttt

SEQ ID NO: 3788 - RNA, 141 nt, synthetic construct
  misc_feature 1..141: note = Description of Artificial Sequence: Synthetic polynucleotide
  source 1..141: mol_type = other RNA
gtttggtgactgccacgcccagttttagagctagaaatagcaagttaaaataaggctagtccgttatcaacttgaaaaagtggcaccgagtcggtgcgccagcagtgaacacccgttgggcgtggcagtcaccaatttttt

SEQ ID NO: 3789 - RNA, 141 nt, synthetic construct
  misc_feature 1..141: note = Description of Artificial Sequence: Synthetic polynucleotide
  source 1..141: mol_type = other RNA
gtttggtgactgccacgcccagttttagagctagaaatagcaagttaaaataaggctagtccgttatcaacttgaaaaagtggcaccgagtcggtgcgccagcagtgaacaccccttgggcgtggcagtcaccaatttttt

SEQ ID NO: 3790 - RNA, 141 nt, synthetic construct
  misc_feature 1..141: note = Description of Artificial Sequence: Synthetic polynucleotide
  source 1..141: mol_type = other RNA
gtttggtgactgccacgcccagttttagagctagaaatagcaagttaaaataaggctagtccgttatcaacttgaaaaagtggcaccgagtcggtgcgaggccagcagtgaacacccattgggcgtggcagtcattttttt

SEQ ID NO: 3791 - RNA, 141 nt, synthetic construct
  misc_feature 1..141: note = Description of Artificial Sequence: Synthetic polynucleotide
  source 1..141: mol_type = other RNA
gtttggtgactgccacgcccagttttagagctagaaatagcaagttaaaataaggctagtccgttatcaacttgaaaaagtggcaccgagtcggtgcgaggccagcagtgaacaccctttgggcgtggcagtcattttttt

SEQ ID NO: 3792 - RNA, 141 nt, synthetic construct
  misc_feature 1..141: note = Description of Artificial Sequence: Synthetic polynucleotide
  source 1..141: mol_type = other RNA
tttggtgactgccacgcccagttttagagctagaaatagcaagttaaaataaggctagtccgttatcaacttgaaaaagtggcaccgagtcggtgcactgcggaggccagcagtgaacaccctttgggcgtggcagtcacc

SEQ ID NO: 3793 - RNA, 141 nt, synthetic construct
  misc_feature 1..141: note = Description of Artificial Sequence: Synthetic polynucleotide
  source 1..141: mol_type = other RNA
tttggtgactgccacgcccagttttagagctagaaatagcaagttaaaataaggctagtccgttatcaacttgaaaaagtggcaccgagtcggtgcgtggggactgcggaggccagcagtgaacacccgttgggcgtggca

SEQ ID NO: 3794 - RNA, 141 nt, synthetic construct
  misc_feature 1..141: note = Description of Artificial Sequence: Synthetic polynucleotide
  source 1..141: mol_type = other RNA
tttggtgactgccacgcccagttttagagctagaaatagcaagttaaaataaggctagtccgttatcaacttgaaaaagtggcaccgagtcggtgcactgcggaggccagcagtgaacacccattgggcgtggcagtcacc

SEQ ID NO: 3795 - RNA, 141 nt, synthetic construct
  misc_feature 1..141: note = Description of Artificial Sequence: Synthetic polynucleotide
  source 1..141: mol_type = other RNA
tttggtgactgccacgcccagttttagagctagaaatagcaagttaaaataaggctagtccgttatcaacttgaaaaagtggcaccgagtcggtgcggtggggactgcggaggccagcagtgaacaccccttgggcgtggc

SEQ ID NO: 3796 - RNA, 141 nt, synthetic construct
  misc_feature 1..141: note = Description of Artificial Sequence: Synthetic polynucleotide
  source 1..141: mol_type = other RNA
tttggtgactgccacgcccagttttagagctagaaatagcaagttaaaataaggctagtccgttatcaacttgaaaaagtggcaccgagtcggtgcgtggggactgcggaggccagcagtgaacaccccttgggcgtggca

SEQ ID NO: 3797 - RNA, 141 nt, synthetic construct
  misc_feature 1..141: note = Description of Artificial Sequence: Synthetic polynucleotide
  source 1..141: mol_type = other RNA
tttggtgactgccacgcccagttttagagctagaaatagcaagttaaaataaggctagtccgttatcaacttgaaaaagtggcaccgagtcggtgcgggactgcggaggccagcagtgaacaccccttgggcgtggcagtc

SEQ ID NO: 3798 - RNA, 141 nt, synthetic construct
  misc_feature 1..141: note = Description of Artificial Sequence: Synthetic polynucleotide
  source 1..141: mol_type = other RNA
tttggtgactgccacgcccagttttagagctagaaatagcaagttaaaataaggctagtccgttatcaacttgaaaaagtggcaccgagtcggtgcgactgcggaggccagcagtgaacaccctttgggcgtggcagtcac

SEQ ID NO: 3799 - RNA, 141 nt, synthetic construct
  misc_feature 1..141: note = Description of Artificial Sequence: Synthetic polynucleotide
  source 1..141: mol_type = other RNA
tttggtgactgccacgcccagttttagagctagaaatagcaagttaaaataaggctagtccgttatcaacttgaaaaagtggcaccgagtcggtgctggggactgcggaggccagcagtgaacaccccttgggcgtggcag

SEQ ID NO: 3800 - RNA, 141 nt, synthetic construct
  misc_feature 1..141: note = Description of Artificial Sequence: Synthetic polynucleotide
  source 1..141: mol_type = other RNA
tttggtgactgccacgcccagttttagagctagaaatagcaagttaaaataaggctagtccgttatcaacttgaaaaagtggcaccgagtcggtgcgtggggactgcggaggccagcagtgaacaccctttgggcgtggca

SEQ ID NO: 3801 - RNA, 141 nt, synthetic construct
  misc_feature 1..141: note = Description of Artificial Sequence: Synthetic polynucleotide
  source 1..141: mol_type = other RNA
tttggtgactgccacgcccagttttagagctagaaatagcaagttaaaataaggctagtccgttatcaacttgaaaaagtggcaccgagtcggtgcgggactgcggaggccagcagtgaacacccgttgggcgtggcagtc

SEQ ID NO: 3802 - RNA, 141 nt, synthetic construct
  misc_feature 1..141: note = Description of Artificial Sequence: Synthetic polynucleotide
  source 1..141: mol_type = other RNA
tttggtgactgccacgcccagttttagagctagaaatagcaagttaaaataaggctagtccgttatcaacttgaaaaagtggcaccgagtcggtgcggggactgcggaggccagcagtgaacaccctttgggcgtggcagt

SEQ ID NO: 3803 - RNA, 141 nt, synthetic construct
  misc_feature 1..141: note = Description of Artificial Sequence: Synthetic polynucleotide
  source 1..141: mol_type = other RNA
tttggtgactgccacgcccagttttagagctagaaatagcaagttaaaataaggctagtccgttatcaacttgaaaaagtggcaccgagtcggtgcggggactgcggaggccagcagtgaacacccgttgggcgtggcagt

SEQ ID NO: 3804 - RNA, 141 nt, synthetic construct
  misc_feature 1..141: note = Description of Artificial Sequence: Synthetic polynucleotide
  source 1..141: mol_type = other RNA
tttggtgactgccacgcccagttttagagctagaaatagcaagttaaaataaggctagtccgttatcaacttgaaaaagtggcaccgagtcggtgcgactgcggaggccagcagtgaacaccccttgggcgtggcagtcac

SEQ ID NO: 3805 - RNA, 141 nt, synthetic construct
  misc_feature 1..141: note = Description of Artificial Sequence: Synthetic polynucleotide
  source 1..141: mol_type = other RNA
tttggtgactgccacgcccagttttagagctagaaatagcaagttaaaataaggctagtccgttatcaacttgaaaaagtggcaccgagtcggtgcggtggggactgcggaggccagcagtgaacacccattgggcgtggc

SEQ ID NO: 3806 - RNA, 141 nt, synthetic construct
  misc_feature 1..141: note = Description of Artificial Sequence: Synthetic polynucleotide
  source 1..141: mol_type = other RNA
tttggtgactgccacgcccagttttagagctagaaatagcaagttaaaataaggctagtccgttatcaacttgaaaaagtggcaccgagtcggtgcactgcggaggccagcagtgaacaccccttgggcgtggcagtcacc

SEQ ID NO: 3807 - RNA, 141 nt, synthetic construct
  misc_feature 1..141: note = Description of Artificial Sequence: Synthetic polynucleotide
  source 1..141: mol_type = other RNA
tttggtgactgccacgcccagttttagagctagaaatagcaagttaaaataaggctagtccgttatcaacttgaaaaagtggcaccgagtcggtgcggggactgcggaggccagcagtgaacaccccttgggcgtggcagt

SEQ ID NO: 3808 - RNA, 141 nt, synthetic construct
  misc_feature 1..141: note = Description of Artificial Sequence: Synthetic polynucleotide
  source 1..141: mol_type = other RNA
tttggtgactgccacgcccagttttagagctagaaatagcaagttaaaataaggctagtccgttatcaacttgaaaaagtggcaccgagtcggtgcggactgcggaggccagcagtgaacaccctttgggcgtggcagtca

SEQ ID NO: 3809 - RNA, 141 nt, synthetic construct
  misc_feature 1..141: note = Description of Artificial Sequence: Synthetic polynucleotide
  source 1..141: mol_type = other RNA
tttggtgactgccacgcccagttttagagctagaaatagcaagttaaaataaggctagtccgttatcaacttgaaaaagtggcaccgagtcggtgctggggactgcggaggccagcagtgaacacccattgggcgtggcag

SEQ ID NO: 3810 - RNA, 141 nt, synthetic construct
  misc_feature 1..141: note = Description of Artificial Sequence: Synthetic polynucleotide
  source 1..141: mol_type = other RNA
tttggtgactgccacgcccagttttagagctagaaatagcaagttaaaataaggctagtccgttatcaacttgaaaaagtggcaccgagtcggtgcggactgcggaggccagcagtgaacaccccttgggcgtggcagtca

SEQ ID NO: 3811 - RNA, 141 nt, synthetic construct
  misc_feature 1..141: note = Description of Artificial Sequence: Synthetic polynucleotide
  source 1..141: mol_type = other RNA
tttggtgactgccacgcccagttttagagctagaaatagcaagttaaaataaggctagtccgttatcaacttgaaaaagtggcaccgagtcggtgcactgcggaggccagcagtgaacacccgttgggcgtggcagtcacc

SEQ ID NO: 3812 - RNA, 141 nt, synthetic construct
  misc_feature 1..141: note = Description of Artificial Sequence: Synthetic polynucleotide
  source 1..141: mol_type = other RNA
tttggtgactgccacgcccagttttagagctagaaatagcaagttaaaataaggctagtccgttatcaacttgaaaaagtggcaccgagtcggtgcgactgcggaggccagcagtgaacacccgttgggcgtggcagtcac

SEQ ID NO: 3813 - RNA, 141 nt, synthetic construct
  misc_feature 1..141: note = Description of Artificial Sequence: Synthetic polynucleotide
  source 1..141: mol_type = other RNA
gtttggtgactgccacgcccagttttagagctagaaatagcaagttaaaataaggctagtccgttatcaacttgaaaaagtggcaccgagtcggtgctgcggaggccagcagtgaacaccctttgggcgtggcattttttt

SEQ ID NO: 3814 - RNA, 141 nt, synthetic construct
  misc_feature 1..141: note = Description of Artificial Sequence: Synthetic polynucleotide
  source 1..141: mol_type = other RNA
tttggtgactgccacgcccagttttagagctagaaatagcaagttaaaataaggctagtccgttatcaacttgaaaaagtggcaccgagtcggtgcgtggggactgcggaggccagcagtgaacacccattgggcgtggca

SEQ ID NO: 3815 - RNA, 141 nt, synthetic construct
  misc_feature 1..141: note = Description of Artificial Sequence: Synthetic polynucleotide
  source 1..141: mol_type = other RNA
tttggtgactgccacgcccagttttagagctagaaatagcaagttaaaataaggctagtccgttatcaacttgaaaaagtggcaccgagtcggtgcggtggggactgcggaggccagcagtgaacacccgttgggcgtggc

SEQ ID NO: 3816 - RNA, 141 nt, synthetic construct
  misc_feature 1..141: note = Description of Artificial Sequence: Synthetic polynucleotide
  source 1..141: mol_type = other RNA
tttggtgactgccacgcccagttttagagctagaaatagcaagttaaaataaggctagtccgttatcaacttgaaaaagtggcaccgagtcggtgcggggactgcggaggccagcagtgaacacccattgggcgtggcagt

SEQ ID NO: 3817 - RNA, 141 nt, synthetic construct
  misc_feature 1..141: note = Description of Artificial Sequence: Synthetic polynucleotide
  source 1..141: mol_type = other RNA
gtttggtgactgccacgcccagttttagagctagaaatagcaagttaaaataaggctagtccgttatcaacttgaaaaagtggcaccgagtcggtgcggaggccagcagtgaacaccctttgggcgtggcagtcttttttt

SEQ ID NO: 3818 - RNA, 141 nt, synthetic construct
  misc_feature 1..141: note = Description of Artificial Sequence: Synthetic polynucleotide
  source 1..141: mol_type = other RNA
gtttggtgactgccacgcccagttttagagctagaaatagcaagttaaaataaggctagtccgttatcaacttgaaaaagtggcaccgagtcggtgcgcggaggccagcagtgaacacccgttgggcgtggcagttttttt

SEQ ID NO: 3819 - RNA, 141 nt, synthetic construct
  misc_feature 1..141: note = Description of Artificial Sequence: Synthetic polynucleotide
  source 1..141: mol_type = other RNA
gtttggtgactgccacgcccagttttagagctagaaatagcaagttaaaataaggctagtccgttatcaacttgaaaaagtggcaccgagtcggtgcaggccagcagtgaacacccattgggcgtggcagtcacttttttt

SEQ ID NO: 3820 - RNA, 141 nt, synthetic construct
  misc_feature 1..141: note = Description of Artificial Sequence: Synthetic polynucleotide
  source 1..141: mol_type = other RNA
tttggtgactgccacgcccagttttagagctagaaatagcaagttaaaataaggctagtccgttatcaacttgaaaaagtggcaccgagtcggtgcgactgcggaggccagcagtgaacacccattgggcgtggcagtcac

SEQ ID NO: 3821 - RNA, 141 nt, synthetic construct
  misc_feature 1..141: note = Description of Artificial Sequence: Synthetic polynucleotide
  source 1..141: mol_type = other RNA
gtttggtgactgccacgcccagttttagagctagaaatagcaagttaaaataaggctagtccgttatcaacttgaaaaagtggcaccgagtcggtgcggaggccagcagtgaacaccccttgggcgtggcagtcttttttt

SEQ ID NO: 3822 - RNA, 141 nt, synthetic construct
  misc_feature 1..141: note = Description of Artificial Sequence: Synthetic polynucleotide
  source 1..141: mol_type = other RNA
gtttggtgactgccacgcccagttttagagctagaaatagcaagttaaaataaggctagtccgttatcaacttgaaaaagtggcaccgagtcggtgctgcggaggccagcagtgaacaccccttgggcgtggcattttttt

SEQ ID NO: 3823 - RNA, 141 nt, synthetic construct
  misc_feature 1..141: note = Description of Artificial Sequence: Synthetic polynucleotide
  source 1..141: mol_type = other RNA
gtttggtgactgccacgcccagttttagagctagaaatagcaagttaaaataaggctagtccgttatcaacttgaaaaagtggcaccgagtcggtgctgcggaggccagcagtgaacacccattgggcgtggcattttttt

SEQ ID NO: 3824 - RNA, 141 nt, synthetic construct
  misc_feature 1..141: note = Description of Artificial Sequence: Synthetic polynucleotide
  source 1..141: mol_type = other RNA
gtttggtgactgccacgcccagttttagagctagaaatagcaagttaaaataaggctagtccgttatcaacttgaaaaagtggcaccgagtcggtgcggccagcagtgaacacccattgggcgtggcagtcaccttttttt

SEQ ID NO: 3825 - RNA, 141 nt, synthetic construct
  misc_feature 1..141: note = Description of Artificial Sequence: Synthetic polynucleotide
  source 1..141: mol_type = other RNA
gtttggtgactgccacgcccagttttagagctagaaatagcaagttaaaataaggctagtccgttatcaacttgaaaaagtggcaccgagtcggtgcgcggaggccagcagtgaacaccccttgggcgtggcagttttttt

SEQ ID NO: 3826 - RNA, 141 nt, synthetic construct
  misc_feature 1..141: note = Description of Artificial Sequence: Synthetic polynucleotide
  source 1..141: mol_type = other RNA
gtttggtgactgccacgcccagttttagagctagaaatagcaagttaaaataaggctagtccgttatcaacttgaaaaagtggcaccgagtcggtgctgcggaggccagcagtgaacacccgttgggcgtggcattttttt

SEQ ID NO: 3827 - RNA, 141 nt, synthetic construct
  misc_feature 1..141: note = Description of Artificial Sequence: Synthetic polynucleotide
  source 1..141: mol_type = other RNA
gtttggtgactgccacgcccagttttagagctagaaatagcaagttaaaataaggctagtccgttatcaacttgaaaaagtggcaccgagtcggtgcgccagcagtgaacacccattgggcgtggcagtcaccaatttttt

SEQ ID NO: 3828 - RNA, 141 nt, synthetic construct
  misc_feature 1..141: note = Description of Artificial Sequence: Synthetic polynucleotide
  source 1..141: mol_type = other RNA
gtttggtgactgccacgcccagttttagagctagaaatagcaagttaaaataaggctagtccgttatcaacttgaaaaagtggcaccgagtcggtgcggaggccagcagtgaacacccgttgggcgtggcagtcttttttt

SEQ ID NO: 3829 - RNA, 141 nt, synthetic construct
  misc_feature 1..141: note = Description of Artificial Sequence: Synthetic polynucleotide
  source 1..141: mol_type = other RNA
tttggtgactgccacgcccagttttagagctagaaatagcaagttaaaataaggctagtccgttatcaacttgaaaaagtggcaccgagtcggtgctggggactgcggaggccagcagtgaacacccgttgggcgtggcag

SEQ ID NO: 3830 - RNA, 141 nt, synthetic construct
  misc_feature 1..141: note = Description of Artificial Sequence: Synthetic polynucleotide
  source 1..141: mol_type = other RNA
gtttggtgactgccacgcccagttttagagctagaaatagcaagttaaaataaggctagtccgttatcaacttgaaaaagtggcaccgagtcggtgcggccagcagtgaacaccctttgggcgtggcagtcaccttttttt

SEQ ID NO: 3831 - RNA, 141 nt, synthetic construct
  misc_feature 1..141: note = Description of Artificial Sequence: Synthetic polynucleotide
  source 1..141: mol_type = other RNA
gtttggtgactgccacgcccagttttagagctagaaatagcaagttaaaataaggctagtccgttatcaacttgaaaaagtggcaccgagtcggtgcgaggccagcagtgaacacccgttgggcgtggcagtcattttttt

SEQ ID NO: 3832 - RNA, 141 nt, synthetic construct
  misc_feature 1..141: note = Description of Artificial Sequence: Synthetic polynucleotide
  source 1..141: mol_type = other RNA
gtttggtgactgccacgcccagttttagagctagaaatagcaagttaaaataaggctagtccgttatcaacttgaaaaagtggcaccgagtcggtgcggaggccagcagtgaacacccattgggcgtggcagtcttttttt

SEQ ID NO: 3833 - RNA, 141 nt, synthetic construct
  misc_feature 1..141: note = Description of Artificial Sequence: Synthetic polynucleotide
  source 1..141: mol_type = other RNA
gtttggtgactgccacgcccagttttagagctagaaatagcaagttaaaataaggctagtccgttatcaacttgaaaaagtggcaccgagtcggtgcggccagcagtgaacaccccttgggcgtggcagtcaccttttttt

SEQ ID NO: 3834 - RNA, 141 nt, synthetic construct
  misc_feature 1..141: note = Description of Artificial Sequence: Synthetic polynucleotide
  source 1..141: mol_type = other RNA
gtttggtgactgccacgcccagttttagagctagaaatagcaagttaaaataaggctagtccgttatcaacttgaaaaagtggcaccgagtcggtgcaggccagcagtgaacaccccttgggcgtggcagtcacttttttt

SEQ ID NO: 3835 - RNA, 141 nt, synthetic construct
  misc_feature 1..141: note = Description of Artificial Sequence: Synthetic polynucleotide
  source 1..141: mol_type = other RNA
gtttggtgactgccacgcccagttttagagctagaaatagcaagttaaaataaggctagtccgttatcaacttgaaaaagtggcaccgagtcggtgcggccagcagtgaacacccgttgggcgtggcagtcaccttttttt

SEQ ID NO: 3836 - RNA, 141 nt, synthetic construct
  misc_feature 1..141: note = Description of Artificial Sequence: Synthetic polynucleotide
  source 1..141: mol_type = other RNA
gtttggtgactgccacgcccagttttagagctagaaatagcaagttaaaataaggctagtccgttatcaacttgaaaaagtggcaccgagtcggtgcaggccagcagtgaacaccctttgggcgtggcagtcacttttttt

SEQ ID NO: 3837 - RNA, 141 nt, synthetic construct
  misc_feature 1..141: note = Description of Artificial Sequence: Synthetic polynucleotide
  source 1..141: mol_type = other RNA
gtttggtgactgccacgcccagttttagagctagaaatagcaagttaaaataaggctagtccgttatcaacttgaaaaagtggcaccgagtcggtgcgccagcagtgaacaccctttgggcgtggcagtcaccaatttttt

SEQ ID NO: 3838 - RNA, 141 nt, synthetic construct
  misc_feature 1..141: note = Description of Artificial Sequence: Synthetic polynucleotide
  source 1..141: mol_type = other RNA
gtttggtgactgccacgcccagttttagagctagaaatagcaagttaaaataaggctagtccgttatcaacttgaaaaagtggcaccgagtcggtgcgcggaggccagcagtgaacaccctttgggcgtggcagttttttt

SEQ ID NO: 3839 - RNA, 141 nt, synthetic construct
  misc_feature 1..141: note = Description of Artificial Sequence: Synthetic polynucleotide
  source 1..141: mol_type = other RNA
tttggtgactgccacgcccagttttagagctagaaatagcaagttaaaataaggctagtccgttatcaacttgaaaaagtggcaccgagtcggtgcggtggggactgcggaggccagcagtgaacaccctttgggcgtggc

SEQ ID NO: 3840 - RNA, 141 nt, synthetic construct
  misc_feature 1..141: note = Description of Artificial Sequence: Synthetic polynucleotide
  source 1..141: mol_type = other RNA
gtttggtgactgccacgcccagttttagagctagaaatagcaagttaaaataaggctagtccgttatcaacttgaaaaagtggcaccgagtcggtgcgaggccagcagtgaacaccccttgggcgtggcagtcattttttt

SEQ ID NO: 3841 - RNA, 141 nt, synthetic construct
  misc_feature 1..141: note = Description of Artificial Sequence: Synthetic polynucleotide
  source 1..141: mol_type = other RNA
tttggtgactgccacgcccagttttagagctagaaatagcaagttaaaataaggctagtccgttatcaacttgaaaaagtggcaccgagtcggtgctggggactgcggaggccagcagtgaacaccctttgggcgtggcag

SEQ ID NO: 3842 - RNA, 141 nt, synthetic construct
  misc_feature 1..141: note = Description of Artificial Sequence: Synthetic polynucleotide
  source 1..141: mol_type = other RNA
tttggtgactgccacgcccagttttagagctagaaatagcaagttaaaataaggctagtccgttatcaacttgaaaaagtggcaccgagtcggtgcggactgcggaggccagcagtgaacacccgttgggcgtggcagtca

SEQ ID NO: 3843 - RNA, 141 nt, synthetic construct
  misc_feature 1..141: note = Description of Artificial Sequence: Synthetic polynucleotide
  source 1..141: mol_type = other RNA
tttggtgactgccacgcccagttttagagctagaaatagcaagttaaaataaggctagtccgttatcaacttgaaaaagtggcaccgagtcggtgcgggactgcggaggccagcagtgaacaccctttgggcgtggcagtc

SEQ ID NO: 3844 - RNA, 141 nt, synthetic construct
  misc_feature 1..141: note = Description of Artificial Sequence: Synthetic polynucleotide
  source 1..141: mol_type = other RNA
tttggtgactgccacgcccagttttagagctagaaatagcaagttaaaataaggctagtccgttatcaacttgaaaaagtggcaccgagtcggtgcggactgcggaggccagcagtgaacacccattgggcgtggcagtca

SEQ ID NO: 3845 - RNA, 141 nt, synthetic construct
  misc_feature 1..141: note = Description of Artificial Sequence: Synthetic polynucleotide
  source 1..141: mol_type = other RNA
tttggtgactgccacgcccagttttagagctagaaatagcaagttaaaataaggctagtccgttatcaacttgaaaaagtggcaccgagtcggtgcgggactgcggaggccagcagtgaacacccattgggcgtggcagtc

SEQ ID NO: 3846 - RNA, 142 nt, synthetic construct
  misc_feature 1..142: note = Description of Artificial Sequence: Synthetic polynucleotide
  source 1..142: mol_type = other RNA
gtttggtgactgccacgcccagttttagagctagaaatagcaagttaaaataaggctagtccgttatcaacttgaaaaagtggcaccgagtcggtgcgcggaggccagcagtgaacaccctttgggcgtggcagtttttttt

SEQ ID NO: 3847 - RNA, 142 nt, synthetic construct
  misc_feature 1..142: note = Description of Artificial Sequence: Synthetic polynucleotide
  source 1..142: mol_type = other RNA
gtttggtgactgccacgcccagttttagagctagaaatagcaagttaaaataaggctagtccgttatcaacttgaaaaagtggcaccgagtcggtgctgcggaggccagcagtgaacacccgttgggcgtggcagttttttt

SEQ ID NO: 3848 - RNA, 142 nt, synthetic construct
  misc_feature 1..142: note = Description of Artificial Sequence: Synthetic polynucleotide
  source 1..142: mol_type = other RNA
gtttggtgactgccacgcccagttttagagctagaaatagcaagttaaaataaggctagtccgttatcaacttgaaaaagtggcaccgagtcggtgcactgcggaggccagcagtgaacaccctttgggcgtggcttttttt

SEQ ID NO: 3849 - RNA, 142 nt, synthetic construct
  misc_feature 1..142: note = Description of Artificial Sequence: Synthetic polynucleotide
  source 1..142: mol_type = other RNA
gtttggtgactgccacgcccagttttagagctagaaatagcaagttaaaataaggctagtccgttatcaacttgaaaaagtggcaccgagtcggtgcggaggccagcagtgaacacccgttgggcgtggcagtcattttttt

SEQ ID NO: 3850 - RNA, 142 nt, synthetic construct
  misc_feature 1..142: note = Description of Artificial Sequence: Synthetic polynucleotide
  source 1..142: mol_type = other RNA
gtttggtgactgccacgcccagttttagagctagaaatagcaagttaaaataaggctagtccgttatcaacttgaaaaagtggcaccgagtcggtgcactgcggaggccagcagtgaacaccccttgggcgtggcttttttt

SEQ ID NO: 3851 - RNA, 142 nt, synthetic construct
  misc_feature 1..142: note = Description of Artificial Sequence: Synthetic polynucleotide
  source 1..142: mol_type = other RNA
tttggtgactgccacgcccagttttagagctagaaatagcaagttaaaataaggctagtccgttatcaacttgaaaaagtggcaccgagtcggtgcgtggggactgcggaggccagcagtgaacaccccttgggcgtggcag

SEQ ID NO: 3852 - RNA, 142 nt, synthetic construct
  misc_feature 1..142: note = Description of Artificial Sequence: Synthetic polynucleotide
  source 1..142: mol_type = other RNA
tttggtgactgccacgcccagttttagagctagaaatagcaagttaaaataaggctagtccgttatcaacttgaaaaagtggcaccgagtcggtgcggtggggactgcggaggccagcagtgaacaccctttgggcgtggca

SEQ ID NO: 3853 - RNA, 142 nt, synthetic construct
  misc_feature 1..142: note = Description of Artificial Sequence: Synthetic polynucleotide
  source 1..142: mol_type = other RNA
tttggtgactgccacgcccagttttagagctagaaatagcaagttaaaataaggctagtccgttatcaacttgaaaaagtggcaccgagtcggtgcggggactgcggaggccagcagtgaacaccccttgggcgtggcagtc

SEQ ID NO: 3854 - RNA, 142 nt, synthetic construct
  misc_feature 1..142: note = Description of Artificial Sequence: Synthetic polynucleotide
  source 1..142: mol_type = other RNA
tttggtgactgccacgcccagttttagagctagaaatagcaagttaaaataaggctagtccgttatcaacttgaaaaagtggcaccgagtcggtgctggtggggactgcggaggccagcagtgaacaccccttgggcgtggc

SEQ ID NO: 3855 - RNA, 142 nt, synthetic construct
  misc_feature 1..142: note = Description of Artificial Sequence: Synthetic polynucleotide
  source 1..142: mol_type = other RNA
tttggtgactgccacgcccagttttagagctagaaatagcaagttaaaataaggctagtccgttatcaacttgaaaaagtggcaccgagtcggtgcgactgcggaggccagcagtgaacacccgttgggcgtggcagtcacc

SEQ ID NO: 3856 - RNA, 142 nt, synthetic construct
  misc_feature 1..142: note = Description of Artificial Sequence: Synthetic polynucleotide
  source 1..142: mol_type = other RNA
tttggtgactgccacgcccagttttagagctagaaatagcaagttaaaataaggctagtccgttatcaacttgaaaaagtggcaccgagtcggtgcggactgcggaggccagcagtgaacacccattgggcgtggcagtcac

SEQ ID NO: 3857 - RNA, 142 nt, synthetic construct
  misc_feature 1..142: note = Description of Artificial Sequence: Synthetic polynucleotide
  source 1..142: mol_type = other RNA
tttggtgactgccacgcccagttttagagctagaaatagcaagttaaaataaggctagtccgttatcaacttgaaaaagtggcaccgagtcggtgcggggactgcggaggccagcagtgaacacccgttgggcgtggcagtc

SEQ ID NO: 3858 - RNA, 142 nt, synthetic construct
  misc_feature 1..142: note = Description of Artificial Sequence: Synthetic polynucleotide
  source 1..142: mol_type = other RNA
tttggtgactgccacgcccagttttagagctagaaatagcaagttaaaataaggctagtccgttatcaacttgaaaaagtggcaccgagtcggtgcggactgcggaggccagcagtgaacaccctttgggcgtggcagtcac

SEQ ID NO: 3859 - RNA, 142 nt, synthetic construct
  misc_feature 1..142: note = Description of Artificial Sequence: Synthetic polynucleotide
  source 1..142: mol_type = other RNA
tttggtgactgccacgcccagttttagagctagaaatagcaagttaaaataaggctagtccgttatcaacttgaaaaagtggcaccgagtcggtgctggtggggactgcggaggccagcagtgaacaccctttgggcgtggc

SEQ ID NO: 3860 - RNA, 142 nt, synthetic construct
  misc_feature 1..142: note = Description of Artificial Sequence: Synthetic polynucleotide
  source 1..142: mol_type = other RNA
tttggtgactgccacgcccagttttagagctagaaatagcaagttaaaataaggctagtccgttatcaacttgaaaaagtggcaccgagtcggtgcgactgcggaggccagcagtgaacacccattgggcgtggcagtcacc

SEQ ID NO: 3861 - RNA, 142 nt, synthetic construct
  misc_feature 1..142: note = Description of Artificial Sequence: Synthetic polynucleotide
  source 1..142: mol_type = other RNA
tttggtgactgccacgcccagttttagagctagaaatagcaagttaaaataaggctagtccgttatcaacttgaaaaagtggcaccgagtcggtgctggggactgcggaggccagcagtgaacaccctttgggcgtggcagt

SEQ ID NO: 3862 - RNA, 142 nt, synthetic construct
  misc_feature 1..142: note = Description of Artificial Sequence: Synthetic polynucleotide
  source 1..142: mol_type = other RNA
tttggtgactgccacgcccagttttagagctagaaatagcaagttaaaataaggctagtccgttatcaacttgaaaaagtggcaccgagtcggtgcggggactgcggaggccagcagtgaacacccattgggcgtggcagtc

SEQ ID NO: 3863 - RNA, 142 nt, synthetic construct
  misc_feature 1..142: note = Description of Artificial Sequence: Synthetic polynucleotide
  source 1..142: mol_type = other RNA
tttggtgactgccacgcccagttttagagctagaaatagcaagttaaaataaggctagtccgttatcaacttgaaaaagtggcaccgagtcggtgcgtggggactgcggaggccagcagtgaacaccctttgggcgtggcag

SEQ ID NO: 3864 - RNA, 142 nt, synthetic construct
  misc_feature 1..142: note = Description of Artificial Sequence: Synthetic polynucleotide
  source 1..142: mol_type = other RNA
tttggtgactgccacgcccagttttagagctagaaatagcaagttaaaataaggctagtccgttatcaacttgaaaaagtggcaccgagtcggtgcgtggggactgcggaggccagcagtgaacacccattgggcgtggcag

SEQ ID NO: 3865 - RNA, 142 nt, synthetic construct
  misc_feature 1..142: note = Description of Artificial Sequence: Synthetic polynucleotide
  source 1..142: mol_type = other RNA
tttggtgactgccacgcccagttttagagctagaaatagcaagttaaaataaggctagtccgttatcaacttgaaaaagtggcaccgagtcggtgcgggactgcggaggccagcagtgaacaccccttgggcgtggcagtca

SEQ ID NO: 3866 - RNA, 142 nt, synthetic construct
  misc_feature 1..142: note = Description of Artificial Sequence: Synthetic polynucleotide
  source 1..142: mol_type = other RNA
gtttggtgactgccacgcccagttttagagctagaaatagcaagttaaaataaggctagtccgttatcaacttgaaaaagtggcaccgagtcggtgcggaggccagcagtgaacaccccttgggcgtggcagtcattttttt

SEQ ID NO: 3867 - RNA, 142 nt, synthetic construct
  misc_feature 1..142: note = Description of Artificial Sequence: Synthetic polynucleotide
  source 1..142: mol_type = other RNA
gtttggtgactgccacgcccagttttagagctagaaatagcaagttaaaataaggctagtccgttatcaacttgaaaaagtggcaccgagtcggtgcaggccagcagtgaacacccattgggcgtggcagtcaccttttttt

SEQ ID NO: 3868 - RNA, 142 nt, synthetic construct
  misc_feature 1..142: note = Description of Artificial Sequence: Synthetic polynucleotide
  source 1..142: mol_type = other RNA
tttggtgactgccacgcccagttttagagctagaaatagcaagttaaaataaggctagtccgttatcaacttgaaaaagtggcaccgagtcggtgctggggactgcggaggccagcagtgaacacccgttgggcgtggcagt

SEQ ID NO: 3869 - RNA, 142 nt, synthetic construct
  misc_feature 1..142: note = Description of Artificial Sequence: Synthetic polynucleotide
  source 1..142: mol_type = other RNA
tttggtgactgccacgcccagttttagagctagaaatagcaagttaaaataaggctagtccgttatcaacttgaaaaagtggcaccgagtcggtgcgactgcggaggccagcagtgaacaccctttgggcgtggcagtcacc

SEQ ID NO: 3870 - RNA, 142 nt, synthetic construct
  misc_feature 1..142: note = Description of Artificial Sequence: Synthetic polynucleotide
  source 1..142: mol_type = other RNA
gtttggtgactgccacgcccagttttagagctagaaatagcaagttaaaataaggctagtccgttatcaacttgaaaaagtggcaccgagtcggtgcaggccagcagtgaacaccccttgggcgtggcagtcaccttttttt

SEQ ID NO: 3871 - RNA, 142 nt, synthetic construct
  misc_feature 1..142: note = Description of Artificial Sequence: Synthetic polynucleotide
  source 1..142: mol_type = other RNA
tttggtgactgccacgcccagttttagagctagaaatagcaagttaaaataaggctagtccgttatcaacttgaaaaagtggcaccgagtcggtgcggtggggactgcggaggccagcagtgaacacccgttgggcgtggca

SEQ ID NO: 3872 - RNA, 142 nt, synthetic construct
  misc_feature 1..142: note = Description of Artificial Sequence: Synthetic polynucleotide
  source 1..142: mol_type = other RNA
gtttggtgactgccacgcccagttttagagctagaaatagcaagttaaaataaggctagtccgttatcaacttgaaaaagtggcaccgagtcggtgctgcggaggccagcagtgaacacccattgggcgtggcagttttttt

SEQ ID NO: 3873 - RNA, 142 nt, synthetic construct
  misc_feature 1..142: note = Description of Artificial Sequence: Synthetic polynucleotide
  source 1..142: mol_type = other RNA
gtttggtgactgccacgcccagttttagagctagaaatagcaagttaaaataaggctagtccgttatcaacttgaaaaagtggcaccgagtcggtgcactgcggaggccagcagtgaacacccgttgggcgtggcttttttt

SEQ ID NO: 3874 - RNA, 142 nt, synthetic construct
  misc_feature 1..142: note = Description of Artificial Sequence: Synthetic polynucleotide
  source 1..142: mol_type = other RNA
tttggtgactgccacgcccagttttagagctagaaatagcaagttaaaataaggctagtccgttatcaacttgaaaaagtggcaccgagtcggtgcggtggggactgcggaggccagcagtgaacaccccttgggcgtggca

SEQ ID NO: 3875 - RNA, 142 nt, synthetic construct
  misc_feature 1..142: note = Description of Artificial Sequence: Synthetic polynucleotide
  source 1..142: mol_type = other RNA
tttggtgactgccacgcccagttttagagctagaaatagcaagttaaaataaggctagtccgttatcaacttgaaaaagtggcaccgagtcggtgcgtggggactgcggaggccagcagtgaacacccgttgggcgtggcag

SEQ ID NO: 3876 - RNA, 142 nt, synthetic construct
  misc_feature 1..142: note = Description of Artificial Sequence: Synthetic polynucleotide
  source 1..142: mol_type = other RNA
tttggtgactgccacgcccagttttagagctagaaatagcaagttaaaataaggctagtccgttatcaacttgaaaaagtggcaccgagtcggtgcggtggggactgcggaggccagcagtgaacacccattgggcgtggca

SEQ ID NO: 3877 - RNA, 142 nt, synthetic construct
  misc_feature 1..142: note = Description of Artificial Sequence: Synthetic polynucleotide
  source 1..142: mol_type = other RNA
tttggtgactgccacgcccagttttagagctagaaatagcaagttaaaataaggctagtccgttatcaacttgaaaaagtggcaccgagtcggtgcggactgcggaggccagcagtgaacaccccttgggcgtggcagtcac

SEQ ID NO: 3878 - RNA, 142 nt, synthetic construct
  misc_feature 1..142: note = Description of Artificial Sequence: Synthetic polynucleotide
  source 1..142: mol_type = other RNA
tttggtgactgccacgcccagttttagagctagaaatagcaagttaaaataaggctagtccgttatcaacttgaaaaagtggcaccgagtcggtgcgggactgcggaggccagcagtgaacaccctttgggcgtggcagtca

SEQ ID NO: 3879 - RNA, 142 nt, synthetic construct
  misc_feature 1..142: note = Description of Artificial Sequence: Synthetic polynucleotide
  source 1..142: mol_type = other RNA
tttggtgactgccacgcccagttttagagctagaaatagcaagttaaaataaggctagtccgttatcaacttgaaaaagtggcaccgagtcggtgctggtggggactgcggaggccagcagtgaacacccgttgggcgtggc

SEQ ID NO: 3880 - RNA, 142 nt, synthetic construct
  misc_feature 1..142: note = Description of Artificial Sequence: Synthetic polynucleotide
  source 1..142: mol_type = other RNA
tttggtgactgccacgcccagttttagagctagaaatagcaagttaaaataaggctagtccgttatcaacttgaaaaagtggcaccgagtcggtgcggactgcggaggccagcagtgaacacccgttgggcgtggcagtcac

SEQ ID NO: 3881 - RNA, 142 nt, synthetic construct
  misc_feature 1..142: note = Description of Artificial Sequence: Synthetic polynucleotide
  source 1..142: mol_type = other RNA
gtttggtgactgccacgcccagttttagagctagaaatagcaagttaaaataaggctagtccgttatcaacttgaaaaagtggcaccgagtcggtgcaggccagcagtgaacacccgttgggcgtggcagtcaccttttttt

SEQ ID NO: 3882 - RNA, 142 nt, synthetic construct
  misc_feature 1..142: note = Description of Artificial Sequence: Synthetic polynucleotide
  source 1..142: mol_type = other RNA
tttggtgactgccacgcccagttttagagctagaaatagcaagttaaaataaggctagtccgttatcaacttgaaaaagtggcaccgagtcggtgctggggactgcggaggccagcagtgaacaccccttgggcgtggcagt

SEQ ID NO: 3883 - RNA, 142 nt, synthetic construct
  misc_feature 1..142: note = Description of Artificial Sequence: Synthetic polynucleotide
  source 1..142: mol_type = other RNA
tttggtgactgccacgcccagttttagagctagaaatagcaagttaaaataaggctagtccgttatcaacttgaaaaagtggcaccgagtcggtgcgggactgcggaggccagcagtgaacacccattgggcgtggcagtca

SEQ ID NO: 3884 - RNA, 142 nt, synthetic construct
  misc_feature 1..142: note = Description of Artificial Sequence: Synthetic polynucleotide
  source 1..142: mol_type = other RNA
tttggtgactgccacgcccagttttagagctagaaatagcaagttaaaataaggctagtccgttatcaacttgaaaaagtggcaccgagtcggtgcgactgcggaggccagcagtgaacaccccttgggcgtggcagtcacc

SEQ ID NO: 3885 - RNA, 142 nt, synthetic construct
  misc_feature 1..142: note = Description of Artificial Sequence: Synthetic polynucleotide
  source 1..142: mol_type = other RNA
tttggtgactgccacgcccagttttagagctagaaatagcaagttaaaataaggctagtccgttatcaacttgaaaaagtggcaccgagtcggtgcggggactgcggaggccagcagtgaacaccctttgggcgtggcagtc

SEQ ID NO: 3886 - RNA, 142 nt, synthetic construct
  misc_feature 1..142: note = Description of Artificial Sequence: Synthetic polynucleotide
  source 1..142: mol_type = other RNA
gtttggtgactgccacgcccagttttagagctagaaatagcaagttaaaataaggctagtccgttatcaacttgaaaaagtggcaccgagtcggtgcgaggccagcagtgaacaccctttgggcgtggcagtcacttttttt

SEQ ID NO: 3887 - RNA, 142 nt, synthetic construct
  misc_feature 1..142: note = Description of Artificial Sequence: Synthetic polynucleotide
  source 1..142: mol_type = other RNA
tttggtgactgccacgcccagttttagagctagaaatagcaagttaaaataaggctagtccgttatcaacttgaaaaagtggcaccgagtcggtgcgggactgcggaggccagcagtgaacacccgttgggcgtggcagtca

SEQ ID NO: 3888 - RNA, 142 nt, synthetic construct
  misc_feature 1..142: note = Description of Artificial Sequence: Synthetic polynucleotide
  source 1..142: mol_type = other RNA
gtttggtgactgccacgcccagttttagagctagaaatagcaagttaaaataaggctagtccgttatcaacttgaaaaagtggcaccgagtcggtgcgcggaggccagcagtgaacacccgttgggcgtggcagtttttttt

SEQ ID NO: 3889 - RNA, 142 nt, synthetic construct
  misc_feature 1..142: note = Description of Artificial Sequence: Synthetic polynucleotide
  source 1..142: mol_type = other RNA
gtttggtgactgccacgcccagttttagagctagaaatagcaagttaaaataaggctagtccgttatcaacttgaaaaagtggcaccgagtcggtgcgcggaggccagcagtgaacaccccttgggcgtggcagtttttttt

SEQ ID NO: 3890 - RNA, 142 nt, synthetic construct
  misc_feature 1..142: note = Description of Artificial Sequence: Synthetic polynucleotide
  source 1..142: mol_type = other RNA
gtttggtgactgccacgcccagttttagagctagaaatagcaagttaaaataaggctagtccgttatcaacttgaaaaagtggcaccgagtcggtgctgcggaggccagcagtgaacaccctttgggcgtggcagttttttt

SEQ ID NO: 3891 - RNA, 142 nt, synthetic construct
  misc_feature 1..142: note = Description of Artificial Sequence: Synthetic polynucleotide
  source 1..142: mol_type = other RNA
gtttggtgactgccacgcccagttttagagctagaaatagcaagttaaaataaggctagtccgttatcaacttgaaaaagtggcaccgagtcggtgcgaggccagcagtgaacacccattgggcgtggcagtcacttttttt

SEQ ID NO: 3892 - RNA, 142 nt, synthetic construct
  misc_feature 1..142: note = Description of Artificial Sequence: Synthetic polynucleotide
  source 1..142: mol_type = other RNA
gtttggtgactgccacgcccagttttagagctagaaatagcaagttaaaataaggctagtccgttatcaacttgaaaaagtggcaccgagtcggtgcgcggaggccagcagtgaacacccattgggcgtggcagtttttttt

SEQ ID NO: 3893 - RNA, 142 nt, synthetic construct
  misc_feature 1..142: note = Description of Artificial Sequence: Synthetic polynucleotide
  source 1..142: mol_type = other RNA
gtttggtgactgccacgcccagttttagagctagaaatagcaagttaaaataaggctagtccgttatcaacttgaaaaagtggcaccgagtcggtgcaggccagcagtgaacaccctttgggcgtggcagtcaccttttttt

SEQ ID NO: 3894 - RNA, 142 nt, synthetic construct
  misc_feature 1..142: note = Description of Artificial Sequence: Synthetic polynucleotide
  source 1..142: mol_type = other RNA
gtttggtgactgccacgcccagttttagagctagaaatagcaagttaaaataaggctagtccgttatcaacttgaaaaagtggcaccgagtcggtgcggaggccagcagtgaacacccattgggcgtggcagtcattttttt

SEQ ID NO: 3895 - RNA, 142 nt, synthetic construct
  misc_feature 1..142: note = Description of Artificial Sequence: Synthetic polynucleotide
  source 1..142: mol_type = other RNA
tttggtgactgccacgcccagttttagagctagaaatagcaagttaaaataaggctagtccgttatcaacttgaaaaagtggcaccgagtcggtgctggtggggactgcggaggccagcagtgaacacccattgggcgtggc

SEQ ID NO: 3896 - RNA, 142 nt, synthetic construct
  misc_feature 1..142: note = Description of Artificial Sequence: Synthetic polynucleotide
  source 1..142: mol_type = other RNA
gtttggtgactgccacgcccagttttagagctagaaatagcaagttaaaataaggctagtccgttatcaacttgaaaaagtggcaccgagtcggtgcgaggccagcagtgaacacccgttgggcgtggcagtcacttttttt

SEQ ID NO: 3897 - RNA, 142 nt, synthetic construct
  misc_feature 1..142: note = Description of Artificial Sequence: Synthetic polynucleotide
  source 1..142: mol_type = other RNA
gtttggtgactgccacgcccagttttagagctagaaatagcaagttaaaataaggctagtccgttatcaacttgaaaaagtggcaccgagtcggtgcggaggccagcagtgaacaccctttgggcgtggcagtcattttttt

SEQ ID NO: 3898 - RNA, 142 nt, synthetic construct
  misc_feature 1..142: note = Description of Artificial Sequence: Synthetic polynucleotide
  source 1..142: mol_type = other RNA
gtttggtgactgccacgcccagttttagagctagaaatagcaagttaaaataaggctagtccgttatcaacttgaaaaagtggcaccgagtcggtgctgcggaggccagcagtgaacaccccttgggcgtggcagttttttt

SEQ ID NO: 3899 - RNA, 142 nt, synthetic construct
  misc_feature 1..142: note = Description of Artificial Sequence: Synthetic polynucleotide
  source 1..142: mol_type = other RNA
tttggtgactgccacgcccagttttagagctagaaatagcaagttaaaataaggctagtccgttatcaacttgaaaaagtggcaccgagtcggtgctggggactgcggaggccagcagtgaacacccattgggcgtggcagt

SEQ ID NO: 3900 - RNA, 142 nt, synthetic construct
  misc_feature 1..142: note = Description of Artificial Sequence: Synthetic polynucleotide
  source 1..142: mol_type = other RNA
gtttggtgactgccacgcccagttttagagctagaaatagcaagttaaaataaggctagtccgttatcaacttgaaaaagtggcaccgagtcggtgcactgcggaggccagcagtgaacacccattgggcgtggcttttttt

SEQ ID NO: 3901 - RNA, 142 nt, synthetic construct
  misc_feature 1..142: note = Description of Artificial Sequence: Synthetic polynucleotide
  source 1..142: mol_type = other RNA
gtttggtgactgccacgcccagttttagagctagaaatagcaagttaaaataaggctagtccgttatcaacttgaaaaagtggcaccgagtcggtgcgaggccagcagtgaacaccccttgggcgtggcagtcacttttttt

SEQ ID NO: 3902 - RNA, 143 nt, synthetic construct
  misc_feature 1..143: note = Description of Artificial Sequence: Synthetic polynucleotide
  source 1..143: mol_type = other RNA
gtttggtgactgccacgcccagttttagagctagaaatagcaagttaaaataaggctagtccgttatcaacttgaaaaagtggcaccgagtcggtgcgaggccagcagtgaacacccgttgggcgtggcagtcaccttttttt

SEQ ID NO: 3903 - RNA, 143 nt, synthetic construct
  misc_feature 1..143: note = Description of Artificial Sequence: Synthetic polynucleotide
  source 1..143: mol_type = other RNA
gtttggtgactgccacgcccagttttagagctagaaatagcaagttaaaataaggctagtccgttatcaacttgaaaaagtggcaccgagtcggtgctgcggaggccagcagtgaacaccccttgggcgtggcagtttttttt

SEQ ID NO: 3904 - RNA, 143 nt, synthetic construct
  misc_feature 1..143: note = Description of Artificial Sequence: Synthetic polynucleotide
  source 1..143: mol_type = other RNA
tttggtgactgccacgcccagttttagagctagaaatagcaagttaaaataaggctagtccgttatcaacttgaaaaagtggcaccgagtcggtgcggtggggactgcggaggccagcagtgaacaccccttgggcgtggcag

SEQ ID NO: 3905 - RNA, 143 nt, synthetic construct
  misc_feature 1..143: note = Description of Artificial Sequence: Synthetic polynucleotide
  source 1..143: mol_type = other RNA
gtttggtgactgccacgcccagttttagagctagaaatagcaagttaaaataaggctagtccgttatcaacttgaaaaagtggcaccgagtcggtgcgaggccagcagtgaacacccattgggcgtggcagtcaccttttttt

SEQ ID NO: 3906 - RNA, 143 nt, synthetic construct
  misc_feature 1..143: note = Description of Artificial Sequence: Synthetic polynucleotide
  source 1..143: mol_type = other RNA
gtttggtgactgccacgcccagttttagagctagaaatagcaagttaaaataaggctagtccgttatcaacttgaaaaagtggcaccgagtcggtgcgactgcggaggccagcagtgaacacccattgggcgtggcttttttt

SEQ ID NO: 3907 - RNA, 143 nt, synthetic construct
  misc_feature 1..143: note = Description of Artificial Sequence: Synthetic polynucleotide
  source 1..143: mol_type = other RNA
tttggtgactgccacgcccagttttagagctagaaatagcaagttaaaataaggctagtccgttatcaacttgaaaaagtggcaccgagtcggtgcgtggggactgcggaggccagcagtgaacacccattgggcgtggcagt

SEQ ID NO: 3908 - RNA, 143 nt, synthetic construct
  misc_feature 1..143: note = Description of Artificial Sequence: Synthetic polynucleotide
  source 1..143: mol_type = other RNA
tttggtgactgccacgcccagttttagagctagaaatagcaagttaaaataaggctagtccgttatcaacttgaaaaagtggcaccgagtcggtgcggggactgcggaggccagcagtgaacacccattgggcgtggcagtca

SEQ ID NO: 3909 - RNA, 143 nt, synthetic construct
  misc_feature 1..143: note = Description of Artificial Sequence: Synthetic polynucleotide
  source 1..143: mol_type = other RNA
tttggtgactgccacgcccagttttagagctagaaatagcaagttaaaataaggctagtccgttatcaacttgaaaaagtggcaccgagtcggtgcggggactgcggaggccagcagtgaacaccctttgggcgtggcagtca

SEQ ID NO: 3910 - RNA, 143 nt, synthetic construct
  misc_feature 1..143: note = Description of Artificial Sequence: Synthetic polynucleotide
  source 1..143: mol_type = other RNA
tttggtgactgccacgcccagttttagagctagaaatagcaagttaaaataaggctagtccgttatcaacttgaaaaagtggcaccgagtcggtgctggggactgcggaggccagcagtgaacacccattgggcgtggcagtc

SEQ ID NO: 3911 - RNA, 143 nt, synthetic construct
  misc_feature 1..143: note = Description of Artificial Sequence: Synthetic polynucleotide
  source 1..143: mol_type = other RNA
tttggtgactgccacgcccagttttagagctagaaatagcaagttaaaataaggctagtccgttatcaacttgaaaaagtggcaccgagtcggtgctggtggggactgcggaggccagcagtgaacacccgttgggcgtggca

SEQ ID NO: 3912 - RNA, 143 nt, synthetic construct
  misc_feature 1..143: note = Description of Artificial Sequence: Synthetic polynucleotide
  source 1..143: mol_type = other RNA
tttggtgactgccacgcccagttttagagctagaaatagcaagttaaaataaggctagtccgttatcaacttgaaaaagtggcaccgagtcggtgcgggactgcggaggccagcagtgaacacccgttgggcgtggcagtcac

SEQ ID NO: 3913 - RNA, 143 nt, synthetic construct
  misc_feature 1..143: note = Description of Artificial Sequence: Synthetic polynucleotide
  source 1..143: mol_type = other RNA
tttggtgactgccacgcccagttttagagctagaaatagcaagttaaaataaggctagtccgttatcaacttgaaaaagtggcaccgagtcggtgcgtggtggggactgcggaggccagcagtgaacacccattgggcgtggc

SEQ ID NO: 3914 - RNA, 143 nt, synthetic construct
  misc_feature 1..143: note = Description of Artificial Sequence: Synthetic polynucleotide
  source 1..143: mol_type = other RNA
tttggtgactgccacgcccagttttagagctagaaatagcaagttaaaataaggctagtccgttatcaacttgaaaaagtggcaccgagtcggtgcggggactgcggaggccagcagtgaacaccccttgggcgtggcagtca

SEQ ID NO: 3915 - RNA, 143 nt, synthetic construct
  misc_feature 1..143: note = Description of Artificial Sequence: Synthetic polynucleotide
  source 1..143: mol_type = other RNA
tttggtgactgccacgcccagttttagagctagaaatagcaagttaaaataaggctagtccgttatcaacttgaaaaagtggcaccgagtcggtgctggtggggactgcggaggccagcagtgaacaccctttgggcgtggca

SEQ ID NO: 3916 - RNA, 143 nt, synthetic construct
  misc_feature 1..143: note = Description of Artificial Sequence: Synthetic polynucleotide
  source 1..143: mol_type = other RNA
tttggtgactgccacgcccagttttagagctagaaatagcaagttaaaataaggctagtccgttatcaacttgaaaaagtggcaccgagtcggtgcggtggggactgcggaggccagcagtgaacaccctttgggcgtggcag

SEQ ID NO: 3917 - RNA, 143 nt, synthetic construct
  misc_feature 1..143: note = Description of Artificial Sequence: Synthetic polynucleotide
  source 1..143: mol_type = other RNA
tttggtgactgccacgcccagttttagagctagaaatagcaagttaaaataaggctagtccgttatcaacttgaaaaagtggcaccgagtcggtgctggtggggactgcggaggccagcagtgaacaccccttgggcgtggca

SEQ ID NO: 3918 - RNA, 143 nt, synthetic construct
  misc_feature 1..143: note = Description of Artificial Sequence: Synthetic polynucleotide
  source 1..143: mol_type = other RNA
gtttggtgactgccacgcccagttttagagctagaaatagcaagttaaaataaggctagtccgttatcaacttgaaaaagtggcaccgagtcggtgcggaggccagcagtgaacacccgttgggcgtggcagtcacttttttt

SEQ ID NO: 3919 - RNA, 143 nt, synthetic construct
  misc_feature 1..143: note = Description of Artificial Sequence: Synthetic polynucleotide
  source 1..143: mol_type = other RNA
gtttggtgactgccacgcccagttttagagctagaaatagcaagttaaaataaggctagtccgttatcaacttgaaaaagtggcaccgagtcggtgcgcggaggccagcagtgaacacccgttgggcgtggcagtcttttttt

SEQ ID NO: 3920 - RNA, 143 nt, synthetic construct
  misc_feature 1..143: note = Description of Artificial Sequence: Synthetic polynucleotide
  source 1..143: mol_type = other RNA
gtttggtgactgccacgcccagttttagagctagaaatagcaagttaaaataaggctagtccgttatcaacttgaaaaagtggcaccgagtcggtgcggaggccagcagtgaacaccccttgggcgtggcagtcacttttttt

SEQ ID NO: 3921 - RNA, 143 nt, synthetic construct
  misc_feature 1..143: note = Description of Artificial Sequence: Synthetic polynucleotide
  source 1..143: mol_type = other RNA
tttggtgactgccacgcccagttttagagctagaaatagcaagttaaaataaggctagtccgttatcaacttgaaaaagtggcaccgagtcggtgcgtggtggggactgcggaggccagcagtgaacaccccttgggcgtggc

SEQ ID NO: 3922 - RNA, 143 nt, synthetic construct
  misc_feature 1..143: note = Description of Artificial Sequence: Synthetic polynucleotide
  source 1..143: mol_type = other RNA
gtttggtgactgccacgcccagttttagagctagaaatagcaagttaaaataaggctagtccgttatcaacttgaaaaagtggcaccgagtcggtgcactgcggaggccagcagtgaacaccccttgggcgtggcattttttt

SEQ ID NO: 3923 - RNA, 143 nt, synthetic construct
  misc_feature 1..143: note = Description of Artificial Sequence: Synthetic polynucleotide
  source 1..143: mol_type = other RNA
gtttggtgactgccacgcccagttttagagctagaaatagcaagttaaaataaggctagtccgttatcaacttgaaaaagtggcaccgagtcggtgcactgcggaggccagcagtgaacaccctttgggcgtggcattttttt

SEQ ID NO: 3924 - RNA, 143 nt, synthetic construct
  misc_feature 1..143: note = Description of Artificial Sequence: Synthetic polynucleotide
  source 1..143: mol_type = other RNA
tttggtgactgccacgcccagttttagagctagaaatagcaagttaaaataaggctagtccgttatcaacttgaaaaagtggcaccgagtcggtgctggggactgcggaggccagcagtgaacacccgttgggcgtggcagtc

SEQ ID NO: 3925 - RNA, 143 nt, synthetic construct
  misc_feature 1..143: note = Description of Artificial Sequence: Synthetic polynucleotide
  source 1..143: mol_type = other RNA
gtttggtgactgccacgcccagttttagagctagaaatagcaagttaaaataaggctagtccgttatcaacttgaaaaagtggcaccgagtcggtgcactgcggaggccagcagtgaacacccgttgggcgtggcattttttt

SEQ ID NO: 3926 - RNA, 143 nt, synthetic construct
  misc_feature 1..143: note = Description of Artificial Sequence: Synthetic polynucleotide
  source 1..143: mol_type = other RNA
gtttggtgactgccacgcccagttttagagctagaaatagcaagttaaaataaggctagtccgttatcaacttgaaaaagtggcaccgagtcggtgcgactgcggaggccagcagtgaacaccccttgggcgtggcttttttt

SEQ ID NO: 3927 - RNA, 143 nt, synthetic construct
  misc_feature 1..143: note = Description of Artificial Sequence: Synthetic polynucleotide
  source 1..143: mol_type = other RNA
tttggtgactgccacgcccagttttagagctagaaatagcaagttaaaataaggctagtccgttatcaacttgaaaaagtggcaccgagtcggtgctggggactgcggaggccagcagtgaacaccctttgggcgtggcagtc

SEQ ID NO: 3928 - RNA, 143 nt, synthetic construct
  misc_feature 1..143: note = Description of Artificial Sequence: Synthetic polynucleotide
  source 1..143: mol_type = other RNA
tttggtgactgccacgcccagttttagagctagaaatagcaagttaaaataaggctagtccgttatcaacttgaaaaagtggcaccgagtcggtgcggtggggactgcggaggccagcagtgaacacccgttgggcgtggcag

SEQ ID NO: 3929 - RNA, 143 nt, synthetic construct
  misc_feature 1..143: note = Description of Artificial Sequence: Synthetic polynucleotide
  source 1..143: mol_type = other RNA
tttggtgactgccacgcccagttttagagctagaaatagcaagttaaaataaggctagtccgttatcaacttgaaaaagtggcaccgagtcggtgcgtggggactgcggaggccagcagtgaacaccctttgggcgtggcagt

SEQ ID NO: 3930 - RNA, 143 nt, synthetic construct
  misc_feature 1..143: note = Description of Artificial Sequence: Synthetic polynucleotide
  source 1..143: mol_type = other RNA
gtttggtgactgccacgcccagttttagagctagaaatagcaagttaaaataaggctagtccgttatcaacttgaaaaagtggcaccgagtcggtgcgcggaggccagcagtgaacacccattgggcgtggcagtcttttttt

SEQ ID NO: 3931 - RNA, 143 nt, synthetic construct
  misc_feature 1..143: note = Description of Artificial Sequence: Synthetic polynucleotide
  source 1..143: mol_type = other RNA
tttggtgactgccacgcccagttttagagctagaaatagcaagttaaaataaggctagtccgttatcaacttgaaaaagtggcaccgagtcggtgcgtggtggggactgcggaggccagcagtgaacacccgttgggcgtggc

SEQ ID NO: 3932 - RNA, 143 nt, synthetic construct
  misc_feature 1..143: note = Description of Artificial Sequence: Synthetic polynucleotide
  source 1..143: mol_type = other RNA
tttggtgactgccacgcccagttttagagctagaaatagcaagttaaaataaggctagtccgttatcaacttgaaaaagtggcaccgagtcggtgcgggactgcggaggccagcagtgaacaccccttgggcgtggcagtcac

SEQ ID NO: 3933 - RNA, 143 nt, synthetic construct
  misc_feature 1..143: note = Description of Artificial Sequence: Synthetic polynucleotide
  source 1..143: mol_type = other RNA
gtttggtgactgccacgcccagttttagagctagaaatagcaagttaaaataaggctagtccgttatcaacttgaaaaagtggcaccgagtcggtgcactgcggaggccagcagtgaacacccattgggcgtggcattttttt

SEQ ID NO: 3934 - RNA, 143 nt, synthetic construct
  misc_feature 1..143: note = Description of Artificial Sequence: Synthetic polynucleotide
  source 1..143: mol_type = other RNA
gtttggtgactgccacgcccagttttagagctagaaatagcaagttaaaataaggctagtccgttatcaacttgaaaaagtggcaccgagtcggtgcgactgcggaggccagcagtgaacacccgttgggcgtggcttttttt

SEQ ID NO: 3935 - RNA, 143 nt, synthetic construct
  misc_feature 1..143: note = Description of Artificial Sequence: Synthetic polynucleotide
  source 1..143: mol_type = other RNA
tttggtgactgccacgcccagttttagagctagaaatagcaagttaaaataaggctagtccgttatcaacttgaaaaagtggcaccgagtcggtgctggggactgcggaggccagcagtgaacaccccttgggcgtggcagtc

SEQ ID NO: 3936 - RNA, 143 nt, synthetic construct
  misc_feature 1..143: note = Description of Artificial Sequence: Synthetic polynucleotide
  source 1..143: mol_type = other RNA
tttggtgactgccacgcccagttttagagctagaaatagcaagttaaaataaggctagtccgttatcaacttgaaaaagtggcaccgagtcggtgcggtggggactgcggaggccagcagtgaacacccattgggcgtggcag

SEQ ID NO: 3937 - RNA, 143 nt, synthetic construct
  misc_feature 1..143: note = Description of Artificial Sequence: Synthetic polynucleotide
  source 1..143: mol_type = other RNA
tttggtgactgccacgcccagttttagagctagaaatagcaagttaaaataaggctagtccgttatcaacttgaaaaagtggcaccgagtcggtgcgtggggactgcggaggccagcagtgaacaccccttgggcgtggcagt

SEQ ID NO: 3938 - RNA, 143 nt, synthetic construct
  misc_feature 1..143: note = Description of Artificial Sequence: Synthetic polynucleotide
  source 1..143: mol_type = other RNA
tttggtgactgccacgcccagttttagagctagaaatagcaagttaaaataaggctagtccgttatcaacttgaaaaagtggcaccgagtcggtgctggtggggactgcggaggccagcagtgaacacccattgggcgtggca

SEQ ID NO: 3939 - RNA, 143 nt, synthetic construct
  misc_feature 1..143: note = Description of Artificial Sequence: Synthetic polynucleotide
  source 1..143: mol_type = other RNA
tttggtgactgccacgcccagttttagagctagaaatagcaagttaaaataaggctagtccgttatcaacttgaaaaagtggcaccgagtcggtgcgtggtggggactgcggaggccagcagtgaacaccctttgggcgtggc

SEQ ID NO: 3940 - RNA, 143 nt, synthetic construct
  misc_feature 1..143: note = Description of Artificial Sequence: Synthetic polynucleotide
  source 1..143: mol_type = other RNA
tttggtgactgccacgcccagttttagagctagaaatagcaagttaaaataaggctagtccgttatcaacttgaaaaagtggcaccgagtcggtgcggactgcggaggccagcagtgaacaccctttgggcgtggcagtcacc

SEQ ID NO: 3941 - RNA, 143 nt, synthetic construct
  misc_feature 1..143: note = Description of Artificial Sequence: Synthetic polynucleotide
  source 1..143: mol_type = other RNA
tttggtgactgccacgcccagttttagagctagaaatagcaagttaaaataaggctagtccgttatcaacttgaaaaagtggcaccgagtcggtgcggactgcggaggccagcagtgaacacccgttgggcgtggcagtcacc

SEQ ID NO: 3942 - RNA, 143 nt, synthetic construct
  misc_feature 1..143: note = Description of Artificial Sequence: Synthetic polynucleotide
  source 1..143: mol_type = other RNA
tttggtgactgccacgcccagttttagagctagaaatagcaagttaaaataaggctagtccgttatcaacttgaaaaagtggcaccgagtcggtgcggggactgcggaggccagcagtgaacacccgttgggcgtggcagtca

SEQ ID NO: 3943 - RNA, 143 nt, synthetic construct
  misc_feature 1..143: note = Description of Artificial Sequence: Synthetic polynucleotide
  source 1..143: mol_type = other RNA
tttggtgactgccacgcccagttttagagctagaaatagcaagttaaaataaggctagtccgttatcaacttgaaaaagtggcaccgagtcggtgcgtggggactgcggaggccagcagtgaacacccgttgggcgtggcagt

SEQ ID NO: 3944 - RNA, 143 nt, synthetic construct
  misc_feature 1..143: note = Description of Artificial Sequence: Synthetic polynucleotide
  source 1..143: mol_type = other RNA
gtttggtgactgccacgcccagttttagagctagaaatagcaagttaaaataaggctagtccgttatcaacttgaaaaagtggcaccgagtcggtgctgcggaggccagcagtgaacacccgttgggcgtggcagtttttttt

SEQ ID NO: 3945 - RNA, 143 nt, synthetic construct
  misc_feature 1..143: note = Description of Artificial Sequence: Synthetic polynucleotide
  source 1..143: mol_type = other RNA
tttggtgactgccacgcccagttttagagctagaaatagcaagttaaaataaggctagtccgttatcaacttgaaaaagtggcaccgagtcggtgcggactgcggaggccagcagtgaacaccccttgggcgtggcagtcacc

SEQ ID NO: 3946 - RNA, 143 nt, synthetic construct
  misc_feature 1..143: note = Description of Artificial Sequence: Synthetic polynucleotide
  source 1..143: mol_type = other RNA
tttggtgactgccacgcccagttttagagctagaaatagcaagttaaaataaggctagtccgttatcaacttgaaaaagtggcaccgagtcggtgcgggactgcggaggccagcagtgaacaccctttgggcgtggcagtcac

SEQ ID NO: 3947 - RNA, 143 nt, synthetic construct
  misc_feature 1..143: note = Description of Artificial Sequence: Synthetic polynucleotide
  source 1..143: mol_type = other RNA
gtttggtgactgccacgcccagttttagagctagaaatagcaagttaaaataaggctagtccgttatcaacttgaaaaagtggcaccgagtcggtgctgcggaggccagcagtgaacaccctttgggcgtggcagtttttttt

SEQ ID NO: 3948 - RNA, 143 nt, synthetic construct
  misc_feature 1..143: note = Description of Artificial Sequence: Synthetic polynucleotide
  source 1..143: mol_type = other RNA
gtttggtgactgccacgcccagttttagagctagaaatagcaagttaaaataaggctagtccgttatcaacttgaaaaagtggcaccgagtcggtgcgcggaggccagcagtgaacaccccttgggcgtggcagtcttttttt

SEQ ID NO: 3949 - RNA, 143 nt, synthetic construct
  misc_feature 1..143: note = Description of Artificial Sequence: Synthetic polynucleotide
  source 1..143: mol_type = other RNA
gtttggtgactgccacgcccagttttagagctagaaatagcaagttaaaataaggctagtccgttatcaacttgaaaaagtggcaccgagtcggtgcggaggccagcagtgaacacccattgggcgtggcagtcacttttttt

SEQ ID NO: 3950 - RNA, 143 nt, synthetic construct
  misc_feature 1..143: note = Description of Artificial Sequence: Synthetic polynucleotide
  source 1..143: mol_type = other RNA
gtttggtgactgccacgcccagttttagagctagaaatagcaagttaaaataaggctagtccgttatcaacttgaaaaagtggcaccgagtcggtgcgaggccagcagtgaacaccccttgggcgtggcagtcaccttttttt

SEQ ID NO: 3951 - RNA, 143 nt, synthetic construct
  misc_feature 1..143: note = Description of Artificial Sequence: Synthetic polynucleotide
  source 1..143: mol_type = other RNA
gtttggtgactgccacgcccagttttagagctagaaatagcaagttaaaataaggctagtccgttatcaacttgaaaaagtggcaccgagtcggtgcggaggccagcagtgaacaccctttgggcgtggcagtcacttttttt

SEQ ID NO: 3952 - RNA, 143 nt, synthetic construct
  misc_feature 1..143: note = Description of Artificial Sequence: Synthetic polynucleotide
  source 1..143: mol_type = other RNA
gtttggtgactgccacgcccagttttagagctagaaatagcaagttaaaataaggctagtccgttatcaacttgaaaaagtggcaccgagtcggtgcgaggccagcagtgaacaccctttgggcgtggcagtcaccttttttt

SEQ ID NO: 3953 - RNA, 143 nt, synthetic construct
  misc_feature 1..143: note = Description of Artificial Sequence: Synthetic polynucleotide
  source 1..143: mol_type = other RNA
gtttggtgactgccacgcccagttttagagctagaaatagcaagttaaaataaggctagtccgttatcaacttgaaaaagtggcaccgagtcggtgcgcggaggccagcagtgaacaccctttgggcgtggcagtcttttttt

SEQ ID NO: 3954 - RNA, 143 nt, synthetic construct
  misc_feature 1..143: note = Description of Artificial Sequence: Synthetic polynucleotide
  source 1..143: mol_type = other RNA
gtttggtgactgccacgcccagttttagagctagaaatagcaagttaaaataaggctagtccgttatcaacttgaaaaagtggcaccgagtcggtgctgcggaggccagcagtgaacacccattgggcgtggcagtttttttt

SEQ ID NO: 3955 - RNA, 143 nt, synthetic construct
  misc_feature 1..143: note = Description of Artificial Sequence: Synthetic polynucleotide
  source 1..143: mol_type = other RNA
gtttggtgactgccacgcccagttttagagctagaaatagcaagttaaaataaggctagtccgttatcaacttgaaaaagtggcaccgagtcggtgcgactgcggaggccagcagtgaacaccctttgggcgtggcttttttt

SEQ ID NO: 3956 - RNA, 143 nt, synthetic construct
  misc_feature 1..143: note = Description of Artificial Sequence: Synthetic polynucleotide
  source 1..143: mol_type = other RNA
tttggtgactgccacgcccagttttagagctagaaatagcaagttaaaataaggctagtccgttatcaacttgaaaaagtggcaccgagtcggtgcggactgcggaggccagcagtgaacacccattgggcgtggcagtcacc

SEQ ID NO: 3957 - RNA, 143 nt, synthetic construct
  misc_feature 1..143: note = Description of Artificial Sequence: Synthetic polynucleotide
  source 1..143: mol_type = other RNA
tttggtgactgccacgcccagttttagagctagaaatagcaagttaaaataaggctagtccgttatcaacttgaaaaagtggcaccgagtcggtgcgggactgcggaggccagcagtgaacacccattgggcgtggcagtcac

SEQ ID NO: 3958 - RNA, 144 nt, synthetic construct
  misc_feature 1..144: note = Description of Artificial Sequence: Synthetic polynucleotide
  source 1..144: mol_type = other RNA
gtttggtgactgccacgcccagttttagagctagaaatagcaagttaaaataaggctagtccgttatcaacttgaaaaagtggcaccgagtcggtgcactgcggaggccagcagtgaacaccctttgggcgtggcagttttttt

SEQ ID NO: 3959 - RNA, 144 nt, synthetic construct
  misc_feature 1..144: note = Description of Artificial Sequence: Synthetic polynucleotide
  source 1..144: mol_type = other RNA
gtttggtgactgccacgcccagttttagagctagaaatagcaagttaaaataaggctagtccgttatcaacttgaaaaagtggcaccgagtcggtgcgcggaggccagcagtgaacaccctttgggcgtggcagtcattttttt

SEQ ID NO: 3960 - RNA, 144 nt, synthetic construct
  misc_feature 1..144: note = Description of Artificial Sequence: Synthetic polynucleotide
  source 1..144: mol_type = other RNA
gtttggtgactgccacgcccagttttagagctagaaatagcaagttaaaataaggctagtccgttatcaacttgaaaaagtggcaccgagtcggtgcgcggaggccagcagtgaacacccattgggcgtggcagtcattttttt

SEQ ID NO: 3961 - RNA, 144 nt, synthetic construct
  misc_feature 1..144: note = Description of Artificial Sequence: Synthetic polynucleotide
  source 1..144: mol_type = other RNA
tttggtgactgccacgcccagttttagagctagaaatagcaagttaaaataaggctagtccgttatcaacttgaaaaagtggcaccgagtcggtgcggtggggactgcggaggccagcagtgaacacccgttgggcgtggcagt

SEQ ID NO: 3962 - RNA, 144 nt, synthetic construct
  misc_feature 1..144: note = Description of Artificial Sequence: Synthetic polynucleotide
  source 1..144: mol_type = other RNA
tttggtgactgccacgcccagttttagagctagaaatagcaagttaaaataaggctagtccgttatcaacttgaaaaagtggcaccgagtcggtgcggggactgcggaggccagcagtgaacaccccttgggcgtggcagtcac

SEQ ID NO: 3963 - RNA, 144 nt, synthetic construct
  misc_feature 1..144: note = Description of Artificial Sequence: Synthetic polynucleotide
  source 1..144: mol_type = other RNA
gtttggtgactgccacgcccagttttagagctagaaatagcaagttaaaataaggctagtccgttatcaacttgaaaaagtggcaccgagtcggtgcgcggaggccagcagtgaacacccgttgggcgtggcagtcattttttt

SEQ ID NO: 3964 - RNA, 144 nt, synthetic construct
  misc_feature 1..144: note = Description of Artificial Sequence: Synthetic polynucleotide
  source 1..144: mol_type = other RNA
gtttggtgactgccacgcccagttttagagctagaaatagcaagttaaaataaggctagtccgttatcaacttgaaaaagtggcaccgagtcggtgcggactgcggaggccagcagtgaacaccctttgggcgtggcttttttt

SEQ ID NO: 3965 - RNA, 144 nt, synthetic construct
  misc_feature 1..144: note = Description of Artificial Sequence: Synthetic polynucleotide
  source 1..144: mol_type = other RNA
tttggtgactgccacgcccagttttagagctagaaatagcaagttaaaataaggctagtccgttatcaacttgaaaaagtggcaccgagtcggtgcggggactgcggaggccagcagtgaacacccattgggcgtggcagtcac

SEQ ID NO: 3966 - RNA, 144 nt, synthetic construct
  misc_feature 1..144: note = Description of Artificial Sequence: Synthetic polynucleotide
  source 1..144: mol_type = other RNA
gtttggtgactgccacgcccagttttagagctagaaatagcaagttaaaataaggctagtccgttatcaacttgaaaaagtggcaccgagtcggtgcgactgcggaggccagcagtgaacacccgttgggcgtggcattttttt

SEQ ID NO: 3967 - RNA, 144 nt, synthetic construct
  misc_feature 1..144: note = Description of Artificial Sequence: Synthetic polynucleotide
  source 1..144: mol_type = other RNA
gtttggtgactgccacgcccagttttagagctagaaatagcaagttaaaataaggctagtccgttatcaacttgaaaaagtggcaccgagtcggtgcgactgcggaggccagcagtgaacacccattgggcgtggcattttttt

SEQ ID NO: 3968 - RNA, 144 nt, synthetic construct
  misc_feature 1..144: note = Description of Artificial Sequence: Synthetic polynucleotide
  source 1..144: mol_type = other RNA
gtttggtgactgccacgcccagttttagagctagaaatagcaagttaaaataaggctagtccgttatcaacttgaaaaagtggcaccgagtcggtgcggaggccagcagtgaacaccctttgggcgtggcagtcaccttttttt

SEQ ID NO: 3969 - RNA, 144 nt, synthetic construct
  misc_feature 1..144: note = Description of Artificial Sequence: Synthetic polynucleotide
  source 1..144: mol_type = other RNA
gtttggtgactgccacgcccagttttagagctagaaatagcaagttaaaataaggctagtccgttatcaacttgaaaaagtggcaccgagtcggtgcgactgcggaggccagcagtgaacaccctttgggcgtggcattttttt

SEQ ID NO: 3970 - RNA, 144 nt, synthetic construct
  misc_feature 1..144: note = Description of Artificial Sequence: Synthetic polynucleotide
  source 1..144: mol_type = other RNA
gtttggtgactgccacgcccagttttagagctagaaatagcaagttaaaataaggctagtccgttatcaacttgaaaaagtggcaccgagtcggtgcggaggccagcagtgaacacccgttgggcgtggcagtcaccttttttt

SEQ ID NO: 3971 - RNA, 144 nt, synthetic construct
  misc_feature 1..144: note = Description of Artificial Sequence: Synthetic polynucleotide
  source 1..144: mol_type = other RNA
tttggtgactgccacgcccagttttagagctagaaatagcaagttaaaataaggctagtccgttatcaacttgaaaaagtggcaccgagtcggtgctggtggggactgcggaggccagcagtgaacaccccttgggcgtggcag

SEQ ID NO: 3972 - RNA, 144 nt, synthetic construct
  misc_feature 1..144: note = Description of Artificial Sequence: Synthetic polynucleotide
  source 1..144: mol_type = other RNA
gtttggtgactgccacgcccagttttagagctagaaatagcaagttaaaataaggctagtccgttatcaacttgaaaaagtggcaccgagtcggtgctgcggaggccagcagtgaacaccccttgggcgtggcagtcttttttt

SEQ ID NO: 3973 - RNA, 144 nt, synthetic construct
  misc_feature 1..144: note = Description of Artificial Sequence: Synthetic polynucleotide
  source 1..144: mol_type = other RNA
gtttggtgactgccacgcccagttttagagctagaaatagcaagttaaaataaggctagtccgttatcaacttgaaaaagtggcaccgagtcggtgctgcggaggccagcagtgaacacccgttgggcgtggcagtcttttttt

SEQ ID NO: 3974 - RNA, 144 nt, synthetic construct
  misc_feature 1..144: note = Description of Artificial Sequence: Synthetic polynucleotide
  source 1..144: mol_type = other RNA
gtttggtgactgccacgcccagttttagagctagaaatagcaagttaaaataaggctagtccgttatcaacttgaaaaagtggcaccgagtcggtgcgcggaggccagcagtgaacaccccttgggcgtggcagtcattttttt

SEQ ID NO: 3975 - RNA, 144 nt, synthetic construct
  misc_feature 1..144: note = Description of Artificial Sequence: Synthetic polynucleotide
  source 1..144: mol_type = other RNA
gtttggtgactgccacgcccagttttagagctagaaatagcaagttaaaataaggctagtccgttatcaacttgaaaaagtggcaccgagtcggtgcggactgcggaggccagcagtgaacacccattgggcgtggcttttttt

SEQ ID NO: 3976 - RNA, 144 nt, synthetic construct
  misc_feature 1..144: note = Description of Artificial Sequence: Synthetic polynucleotide
  source 1..144: mol_type = other RNA
gtttggtgactgccacgcccagttttagagctagaaatagcaagttaaaataaggctagtccgttatcaacttgaaaaagtggcaccgagtcggtgcggaggccagcagtgaacacccattgggcgtggcagtcaccttttttt

SEQ ID NO: 3977 - RNA, 144 nt, synthetic construct
  misc_feature 1..144: note = Description of Artificial Sequence: Synthetic polynucleotide
  source 1..144: mol_type = other RNA
tttggtgactgccacgcccagttttagagctagaaatagcaagttaaaataaggctagtccgttatcaacttgaaaaagtggcaccgagtcggtgcgtggggactgcggaggccagcagtgaacaccctttgggcgtggcagtc

SEQ ID NO: 3978 - RNA, 144 nt, synthetic construct
  misc_feature 1..144: note = Description of Artificial Sequence: Synthetic polynucleotide
  source 1..144: mol_type = other RNA
tttggtgactgccacgcccagttttagagctagaaatagcaagttaaaataaggctagtccgttatcaacttgaaaaagtggcaccgagtcggtgcgtggggactgcggaggccagcagtgaacaccccttgggcgtggcagtc

SEQ ID NO: 3979 - RNA, 144 nt, synthetic construct
  misc_feature 1..144: note = Description of Artificial Sequence: Synthetic polynucleotide
  source 1..144: mol_type = other RNA
tttggtgactgccacgcccagttttagagctagaaatagcaagttaaaataaggctagtccgttatcaacttgaaaaagtggcaccgagtcggtgctggggactgcggaggccagcagtgaacaccctttgggcgtggcagtca

SEQ ID NO: 3980 - RNA, 144 nt, synthetic construct
  misc_feature 1..144: note = Description of Artificial Sequence: Synthetic polynucleotide
  source 1..144: mol_type = other RNA
tttggtgactgccacgcccagttttagagctagaaatagcaagttaaaataaggctagtccgttatcaacttgaaaaagtggcaccgagtcggtgcgtggtggggactgcggaggccagcagtgaacaccctttgggcgtggca

SEQ ID NO: 3981 - RNA, 144 nt, synthetic construct
  misc_feature 1..144: note = Description of Artificial Sequence: Synthetic polynucleotide
  source 1..144: mol_type = other RNA
tttggtgactgccacgcccagttttagagctagaaatagcaagttaaaataaggctagtccgttatcaacttgaaaaagtggcaccgagtcggtgcgtggtggggactgcggaggccagcagtgaacacccgttgggcgtggca

SEQ ID NO: 3982 - RNA, 144 nt, synthetic construct
  misc_feature 1..144: note = Description of Artificial Sequence: Synthetic polynucleotide
  source 1..144: mol_type = other RNA
tttggtgactgccacgcccagttttagagctagaaatagcaagttaaaataaggctagtccgttatcaacttgaaaaagtggcaccgagtcggtgctggggactgcggaggccagcagtgaacaccccttgggcgtggcagtca

SEQ ID NO: 3983 - RNA, 144 nt, synthetic construct
  misc_feature 1..144: note = Description of Artificial Sequence: Synthetic polynucleotide
  source 1..144: mol_type = other RNA
tttggtgactgccacgcccagttttagagctagaaatagcaagttaaaataaggctagtccgttatcaacttgaaaaagtggcaccgagtcggtgcgtggtggggactgcggaggccagcagtgaacaccccttgggcgtggca

SEQ ID NO: 3984 - RNA, 144 nt, synthetic construct
  misc_feature 1..144: note = Description of Artificial Sequence: Synthetic polynucleotide
  source 1..144: mol_type = other RNA
gtttggtgactgccacgcccagttttagagctagaaatagcaagttaaaataaggctagtccgttatcaacttgaaaaagtggcaccgagtcggtgctgcggaggccagcagtgaacacccattgggcgtggcagtcttttttt

SEQ ID NO: 3985 - RNA, 144 nt, synthetic construct
  misc_feature 1..144: note = Description of Artificial Sequence: Synthetic polynucleotide
  source 1..144: mol_type = other RNA
tttggtgactgccacgcccagttttagagctagaaatagcaagttaaaataaggctagtccgttatcaacttgaaaaagtggcaccgagtcggtgcggtggggactgcggaggccagcagtgaacaccctttgggcgtggcagt

SEQ ID NO: 3986 - RNA, 144 nt, synthetic construct
  misc_feature 1..144: note = Description of Artificial Sequence: Synthetic polynucleotide
  source 1..144: mol_type = other RNA
gtttggtgactgccacgcccagttttagagctagaaatagcaagttaaaataaggctagtccgttatcaacttgaaaaagtggcaccgagtcggtgcactgcggaggccagcagtgaacaccccttgggcgtggcagttttttt

SEQ ID NO: 3987 - RNA, 144 nt, synthetic construct
  misc_feature 1..144: note = Description of Artificial Sequence: Synthetic polynucleotide
  source 1..144: mol_type = other RNA
gtttggtgactgccacgcccagttttagagctagaaatagcaagttaaaataaggctagtccgttatcaacttgaaaaagtggcaccgagtcggtgcgactgcggaggccagcagtgaacaccccttgggcgtggcattttttt

SEQ ID NO: 3988 - RNA, 144 nt, synthetic construct
  misc_feature 1..144: note = Description of Artificial Sequence: Synthetic polynucleotide
  source 1..144: mol_type = other RNA
tttggtgactgccacgcccagttttagagctagaaatagcaagttaaaataaggctagtccgttatcaacttgaaaaagtggcaccgagtcggtgcgggactgcggaggccagcagtgaacaccccttgggcgtggcagtcacc

SEQ ID NO: 3989 - RNA, 144 nt, synthetic construct
  misc_feature 1..144: note = Description of Artificial Sequence: Synthetic polynucleotide
  source 1..144: mol_type = other RNA
tttggtgactgccacgcccagttttagagctagaaatagcaagttaaaataaggctagtccgttatcaacttgaaaaagtggcaccgagtcggtgctggggactgcggaggccagcagtgaacacccattgggcgtggcagtca

SEQ ID NO: 3990 - RNA, 144 nt, synthetic construct
  misc_feature 1..144: note = Description of Artificial Sequence: Synthetic polynucleotide
  source 1..144: mol_type = other RNA
tttggtgactgccacgcccagttttagagctagaaatagcaagttaaaataaggctagtccgttatcaacttgaaaaagtggcaccgagtcggtgctggtggggactgcggaggccagcagtgaacacccgttgggcgtggcag

SEQ ID NO: 3991 - RNA, 144 nt, synthetic construct
  misc_feature 1..144: note = Description of Artificial Sequence: Synthetic polynucleotide
  source 1..144: mol_type = other RNA
tttggtgactgccacgcccagttttagagctagaaatagcaagttaaaataaggctagtccgttatcaacttgaaaaagtggcaccgagtcggtgctggtggggactgcggaggccagcagtgaacacccattgggcgtggcag

SEQ ID NO: 3992 - RNA, 144 nt, synthetic construct
  misc_feature 1..144: note = Description of Artificial Sequence: Synthetic polynucleotide
  source 1..144: mol_type = other RNA
tttggtgactgccacgcccagttttagagctagaaatagcaagttaaaataaggctagtccgttatcaacttgaaaaagtggcaccgagtcggtgcgtggggactgcggaggccagcagtgaacacccattgggcgtggcagtc

SEQ ID NO: 3993 - RNA, 144 nt, synthetic construct
  misc_feature 1..144: note = Description of Artificial Sequence: Synthetic polynucleotide
  source 1..144: mol_type = other RNA
tttggtgactgccacgcccagttttagagctagaaatagcaagttaaaataaggctagtccgttatcaacttgaaaaagtggcaccgagtcggtgcggtggggactgcggaggccagcagtgaacaccccttgggcgtggcagt

SEQ ID NO: 3994 - RNA, 144 nt, synthetic construct
  misc_feature 1..144: note = Description of Artificial Sequence: Synthetic polynucleotide
  source 1..144: mol_type = other RNA
tttggtgactgccacgcccagttttagagctagaaatagcaagttaaaataaggctagtccgttatcaacttgaaaaagtggcaccgagtcggtgcggtggggactgcggaggccagcagtgaacacccattgggcgtggcagt

SEQ ID NO: 3995 - RNA, 144 nt, synthetic construct
  misc_feature 1..144: note = Description of Artificial Sequence: Synthetic polynucleotide
  source 1..144: mol_type = other RNA
tttggtgactgccacgcccagttttagagctagaaatagcaagttaaaataaggctagtccgttatcaacttgaaaaagtggcaccgagtcggtgcgggactgcggaggccagcagtgaacacccgttgggcgtggcagtcacc

SEQ ID NO: 3996 - RNA, 144 nt, synthetic construct
  misc_feature 1..144: note = Description of Artificial Sequence: Synthetic polynucleotide
  source 1..144: mol_type = other RNA
gtttggtgactgccacgcccagttttagagctagaaatagcaagttaaaataaggctagtccgttatcaacttgaaaaagtggcaccgagtcggtgctgcggaggccagcagtgaacaccctttgggcgtggcagtcttttttt

SEQ ID NO: 3997 - RNA, 144 nt, synthetic construct
  misc_feature 1..144: note = Description of Artificial Sequence: Synthetic polynucleotide
  source 1..144: mol_type = other RNA
tttggtgactgccacgcccagttttagagctagaaatagcaagttaaaataaggctagtccgttatcaacttgaaaaagtggcaccgagtcggtgctggtggggactgcggaggccagcagtgaacaccctttgggcgtggcag

SEQ ID NO: 3998 - RNA, 144 nt, synthetic construct
  misc_feature 1..144: note = Description of Artificial Sequence: Synthetic polynucleotide
  source 1..144: mol_type = other RNA
tttggtgactgccacgcccagttttagagctagaaatagcaagttaaaataaggctagtccgttatcaacttgaaaaagtggcaccgagtcggtgcggggactgcggaggccagcagtgaacacccgttgggcgtggcagtcac

SEQ ID NO: 3999 - RNA, 144 nt, synthetic construct
  misc_feature 1..144: note = Description of Artificial Sequence: Synthetic polynucleotide
  source 1..144: mol_type = other RNA
tttggtgactgccacgcccagttttagagctagaaatagcaagttaaaataaggctagtccgttatcaacttgaaaaagtggcaccgagtcggtgcgtggggactgcggaggccagcagtgaacacccgttgggcgtggcagtc

SEQ ID NO: 4000 - RNA, 144 nt, synthetic construct
  misc_feature 1..144: note = Description of Artificial Sequence: Synthetic polynucleotide
  source 1..144: mol_type = other RNA
gtttggtgactgccacgcccagttttagagctagaaatagcaagttaaaataaggctagtccgttatcaacttgaaaaagtggcaccgagtcggtgcactgcggaggccagcagtgaacacccattgggcgtggcagttttttt

SEQ ID NO: 4001 - RNA, 144 nt, synthetic construct
  misc_feature 1..144: note = Description of Artificial Sequence: Synthetic polynucleotide
  source 1..144: mol_type = other RNA
tttggtgactgccacgcccagttttagagctagaaatagcaagttaaaataaggctagtccgttatcaacttgaaaaagtggcaccgagtcggtgcgggactgcggaggccagcagtgaacaccctttgggcgtggcagtcacc

SEQ ID NO: 4002 - RNA, 144 nt, synthetic construct
  misc_feature 1..144: note = Description of Artificial Sequence: Synthetic polynucleotide
  source 1..144: mol_type = other RNA
tttggtgactgccacgcccagttttagagctagaaatagcaagttaaaataaggctagtccgttatcaacttgaaaaagtggcaccgagtcggtgctggggactgcggaggccagcagtgaacacccgttgggcgtggcagtca

SEQ ID NO: 4003 - RNA, 144 nt, synthetic construct
  misc_feature 1..144: note = Description of Artificial Sequence: Synthetic polynucleotide
  source 1..144: mol_type = other RNA
tttggtgactgccacgcccagttttagagctagaaatagcaagttaaaataaggctagtccgttatcaacttgaaaaagtggcaccgagtcggtgcggggactgcggaggccagcagtgaacaccctttgggcgtggcagtcac

SEQ ID NO: 4004 - RNA, 144 nt, synthetic construct
  misc_feature 1..144: note = Description of Artificial Sequence: Synthetic polynucleotide
  source 1..144: mol_type = other RNA
tttggtgactgccacgcccagttttagagctagaaatagcaagttaaaataaggctagtccgttatcaacttgaaaaagtggcaccgagtcggtgcgtggtggggactgcggaggccagcagtgaacacccattgggcgtggca

SEQ ID NO: 4005 - RNA, 144 nt, synthetic construct
  misc_feature 1..144: note = Description of Artificial Sequence: Synthetic polynucleotide
  source 1..144: mol_type = other RNA
gtttggtgactgccacgcccagttttagagctagaaatagcaagttaaaataaggctagtccgttatcaacttgaaaaagtggcaccgagtcggtgcggactgcggaggccagcagtgaacaccccttgggcgtggcttttttt

SEQ ID NO: 4006 - RNA, 144 nt, synthetic construct
  misc_feature 1..144: note = Description of Artificial Sequence: Synthetic polynucleotide
  source 1..144: mol_type = other RNA
gtttggtgactgccacgcccagttttagagctagaaatagcaagttaaaataaggctagtccgttatcaacttgaaaaagtggcaccgagtcggtgcactgcggaggccagcagtgaacacccgttgggcgtggcagttttttt

SEQ ID NO: 4007 - RNA, 144 nt, synthetic construct
  misc_feature 1..144: note = Description of Artificial Sequence: Synthetic polynucleotide
  source 1..144: mol_type = other RNA
gtttggtgactgccacgcccagttttagagctagaaatagcaagttaaaataaggctagtccgttatcaacttgaaaaagtggcaccgagtcggtgcggactgcggaggccagcagtgaacacccgttgggcgtggcttttttt

SEQ ID NO: 4008 - RNA, 144 nt, synthetic construct
  misc_feature 1..144: note = Description of Artificial Sequence: Synthetic polynucleotide
  source 1..144: mol_type = other RNA
gtttggtgactgccacgcccagttttagagctagaaatagcaagttaaaataaggctagtccgttatcaacttgaaaaagtggcaccgagtcggtgcggaggccagcagtgaacaccccttgggcgtggcagtcaccttttttt

SEQ ID NO: 4009 - RNA, 144 nt, synthetic construct
  misc_feature 1..144: note = Description of Artificial Sequence: Synthetic polynucleotide
  source 1..144: mol_type = other RNA
tttggtgactgccacgcccagttttagagctagaaatagcaagttaaaataaggctagtccgttatcaacttgaaaaagtggcaccgagtcggtgcgggactgcggaggccagcagtgaacacccattgggcgtggcagtcacc

SEQ ID NO: 4010 - RNA, 145 nt, synthetic construct
  misc_feature 1..145: note = Description of Artificial Sequence: Synthetic polynucleotide
  source 1..145: mol_type = other RNA
gtttggtgactgccacgcccagttttagagctagaaatagcaagttaaaataaggctagtccgttatcaacttgaaaaagtggcaccgagtcggtgcgactgcggaggccagcagtgaacacccattgggcgtggcagttttttt

SEQ ID NO: 4011 - RNA, 145 nt, synthetic construct
  misc_feature 1..145: note = Description of Artificial Sequence: Synthetic polynucleotide
  source 1..145: mol_type = other RNA
tttggtgactgccacgcccagttttagagctagaaatagcaagttaaaataaggctagtccgttatcaacttgaaaaagtggcaccgagtcggtgcggtggggactgcggaggccagcagtgaacacccattgggcgtggcagtc

SEQ ID NO: 4012 - RNA, 145 nt, synthetic construct
  misc_feature 1..145: note = Description of Artificial Sequence: Synthetic polynucleotide
  source 1..145: mol_type = other RNA
tttggtgactgccacgcccagttttagagctagaaatagcaagttaaaataaggctagtccgttatcaacttgaaaaagtggcaccgagtcggtgcgtggggactgcggaggccagcagtgaacacccgttgggcgtggcagtca

SEQ ID NO: 4013 - RNA, 145 nt, synthetic construct
  misc_feature 1..145: note = Description of Artificial Sequence: Synthetic polynucleotide
  source 1..145: mol_type = other RNA
tttggtgactgccacgcccagttttagagctagaaatagcaagttaaaataaggctagtccgttatcaacttgaaaaagtggcaccgagtcggtgctggggactgcggaggccagcagtgaacaccctttgggcgtggcagtcac

SEQ ID NO: 4014 - RNA, 145 nt, synthetic construct
  misc_feature 1..145: note = Description of Artificial Sequence: Synthetic polynucleotide
  source 1..145: mol_type = other RNA
gtttggtgactgccacgcccagttttagagctagaaatagcaagttaaaataaggctagtccgttatcaacttgaaaaagtggcaccgagtcggtgcactgcggaggccagcagtgaacacccgttgggcgtggcagtttttttt

SEQ ID NO: 4015 - RNA, 145 nt, synthetic construct
  misc_feature 1..145: note = Description of Artificial Sequence: Synthetic polynucleotide
  source 1..145: mol_type = other RNA
tttggtgactgccacgcccagttttagagctagaaatagcaagttaaaataaggctagtccgttatcaacttgaaaaagtggcaccgagtcggtgctggggactgcggaggccagcagtgaacacccgttgggcgtggcagtcac

SEQ ID NO: 4016 - RNA, 145 nt, synthetic construct
  misc_feature 1..145: note = Description of Artificial Sequence: Synthetic polynucleotide
  source 1..145: mol_type = other RNA
tttggtgactgccacgcccagttttagagctagaaatagcaagttaaaataaggctagtccgttatcaacttgaaaaagtggcaccgagtcggtgcgtggggactgcggaggccagcagtgaacaccccttgggcgtggcagtca

SEQ ID NO: 4017 - RNA, 145 nt, synthetic construct
  misc_feature 1..145: note = Description of Artificial Sequence: Synthetic polynucleotide
  source 1..145: mol_type = other RNA
tttggtgactgccacgcccagttttagagctagaaatagcaagttaaaataaggctagtccgttatcaacttgaaaaagtggcaccgagtcggtgcggggactgcggaggccagcagtgaacacccgttgggcgtggcagtcacc

SEQ ID NO: 4018 - RNA, 145 nt, synthetic construct
  misc_feature 1..145: note = Description of Artificial Sequence: Synthetic polynucleotide
  source 1..145: mol_type = other RNA
gtttggtgactgccacgcccagttttagagctagaaatagcaagttaaaataaggctagtccgttatcaacttgaaaaagtggcaccgagtcggtgcgggactgcggaggccagcagtgaacaccccttgggcgtggcttttttt

SEQ ID NO: 4019 - RNA, 145 nt, synthetic construct
  misc_feature 1..145: note = Description of Artificial Sequence: Synthetic polynucleotide
  source 1..145: mol_type = other RNA
gtttggtgactgccacgcccagttttagagctagaaatagcaagttaaaataaggctagtccgttatcaacttgaaaaagtggcaccgagtcggtgcgactgcggaggccagcagtgaacaccccttgggcgtggcagttttttt

SEQ ID NO: 4020 - RNA, 145 nt, synthetic construct
  misc_feature 1..145: note = Description of Artificial Sequence: Synthetic polynucleotide
  source 1..145: mol_type = other RNA
tttggtgactgccacgcccagttttagagctagaaatagcaagttaaaataaggctagtccgttatcaacttgaaaaagtggcaccgagtcggtgctggggactgcggaggccagcagtgaacacccattgggcgtggcagtcac

SEQ ID NO: 4021 - RNA, 145 nt, synthetic construct
  misc_feature 1..145: note = Description of Artificial Sequence: Synthetic polynucleotide
  source 1..145: mol_type = other RNA
tttggtgactgccacgcccagttttagagctagaaatagcaagttaaaataaggctagtccgttatcaacttgaaaaagtggcaccgagtcggtgcggtggggactgcggaggccagcagtgaacaccccttgggcgtggcagtc

SEQ ID NO: 4022 - RNA, 145 nt, synthetic construct
  misc_feature 1..145: note = Description of Artificial Sequence: Synthetic polynucleotide
  source 1..145: mol_type = other RNA
gtttggtgactgccacgcccagttttagagctagaaatagcaagttaaaataaggctagtccgttatcaacttgaaaaagtggcaccgagtcggtgctgcggaggccagcagtgaacacccattgggcgtggcagtcattttttt

SEQ ID NO: 4023 - RNA, 145 nt, synthetic construct
  misc_feature 1..145: note = Description of Artificial Sequence: Synthetic polynucleotide
  source 1..145: mol_type = other RNA
tttggtgactgccacgcccagttttagagctagaaatagcaagttaaaataaggctagtccgttatcaacttgaaaaagtggcaccgagtcggtgcgtggtggggactgcggaggccagcagtgaacaccccttgggcgtggcag

SEQ ID NO: 4024 - RNA, 145 nt, synthetic construct
  misc_feature 1..145: note = Description of Artificial Sequence: Synthetic polynucleotide
  source 1..145: mol_type = other RNA
gtttggtgactgccacgcccagttttagagctagaaatagcaagttaaaataaggctagtccgttatcaacttgaaaaagtggcaccgagtcggtgcgactgcggaggccagcagtgaacacccgttgggcgtggcagttttttt

SEQ ID NO: 4025 - RNA, 145 nt, synthetic construct
  misc_feature 1..145: note = Description of Artificial Sequence: Synthetic polynucleotide
  source 1..145: mol_type = other RNA
tttggtgactgccacgcccagttttagagctagaaatagcaagttaaaataaggctagtccgttatcaacttgaaaaagtggcaccgagtcggtgctggtggggactgcggaggccagcagtgaacaccccttgggcgtggcagt

SEQ ID NO: 4026 - RNA, 145 nt, synthetic construct
  misc_feature 1..145: note = Description of Artificial Sequence: Synthetic polynucleotide
  source 1..145: mol_type = other RNA
tttggtgactgccacgcccagttttagagctagaaatagcaagttaaaataaggctagtccgttatcaacttgaaaaagtggcaccgagtcggtgctggtggggactgcggaggccagcagtgaacacccgttgggcgtggcagt

SEQ ID NO: 4027 - RNA, 145 nt, synthetic construct
  misc_feature 1..145: note = Description of Artificial Sequence: Synthetic polynucleotide
  source 1..145: mol_type = other RNA
gtttggtgactgccacgcccagttttagagctagaaatagcaagttaaaataaggctagtccgttatcaacttgaaaaagtggcaccgagtcggtgcgcggaggccagcagtgaacacccgttgggcgtggcagtcacttttttt

SEQ ID NO: 4028 - RNA, 145 nt, synthetic construct
  misc_feature 1..145: note = Description of Artificial Sequence: Synthetic polynucleotide
  source 1..145: mol_type = other RNA
tttggtgactgccacgcccagttttagagctagaaatagcaagttaaaataaggctagtccgttatcaacttgaaaaagtggcaccgagtcggtgcggggactgcggaggccagcagtgaacaccctttgggcgtggcagtcacc

SEQ ID NO: 4029 - RNA, 145 nt, synthetic construct
  misc_feature 1..145: note = Description of Artificial Sequence: Synthetic polynucleotide
  source 1..145: mol_type = other RNA
tttggtgactgccacgcccagttttagagctagaaatagcaagttaaaataaggctagtccgttatcaacttgaaaaagtggcaccgagtcggtgcggggactgcggaggccagcagtgaacacccattgggcgtggcagtcacc

SEQ ID NO: 4030 - RNA, 145 nt, synthetic construct
  misc_feature 1..145: note = Description of Artificial Sequence: Synthetic polynucleotide
  source 1..145: mol_type = other RNA
gtttggtgactgccacgcccagttttagagctagaaatagcaagttaaaataaggctagtccgttatcaacttgaaaaagtggcaccgagtcggtgctgcggaggccagcagtgaacacccgttgggcgtggcagtcattttttt

SEQ ID NO: 4031 - RNA, 145 nt, synthetic construct
  misc_feature 1..145: note = Description of Artificial Sequence: Synthetic polynucleotide
  source 1..145: mol_type = other RNA
tttggtgactgccacgcccagttttagagctagaaatagcaagttaaaataaggctagtccgttatcaacttgaaaaagtggcaccgagtcggtgctggtggggactgcggaggccagcagtgaacaccctttgggcgtggcagt

SEQ ID NO: 4032 - RNA, 145 nt, synthetic construct
  misc_feature 1..145: note = Description of Artificial Sequence: Synthetic polynucleotide
  source 1..145: mol_type = other RNA
tttggtgactgccacgcccagttttagagctagaaatagcaagttaaaataaggctagtccgttatcaacttgaaaaagtggcaccgagtcggtgcggggactgcggaggccagcagtgaacaccccttgggcgtggcagtcacc

SEQ ID NO: 4033 - RNA, 145 nt, synthetic construct
  misc_feature 1..145: note = Description of Artificial Sequence: Synthetic polynucleotide
  source 1..145: mol_type = other RNA
gtttggtgactgccacgcccagttttagagctagaaatagcaagttaaaataaggctagtccgttatcaacttgaaaaagtggcaccgagtcggtgcggactgcggaggccagcagtgaacacccattgggcgtggcattttttt

SEQ ID NO: 4034 - RNA, 145 nt, synthetic construct
  misc_feature 1..145: note = Description of Artificial Sequence: Synthetic polynucleotide
  source 1..145: mol_type = other RNA
tttggtgactgccacgcccagttttagagctagaaatagcaagttaaaataaggctagtccgttatcaacttgaaaaagtggcaccgagtcggtgcgtggtggggactgcggaggccagcagtgaacaccctttgggcgtggcag

SEQ ID NO: 4035 - RNA, 145 nt, synthetic construct
  misc_feature 1..145: note = Description of Artificial Sequence: Synthetic polynucleotide
  source 1..145: mol_type = other RNA
tttggtgactgccacgcccagttttagagctagaaatagcaagttaaaataaggctagtccgttatcaacttgaaaaagtggcaccgagtcggtgcgtggggactgcggaggccagcagtgaacacccattgggcgtggcagtca

SEQ ID NO: 4036 - RNA, 145 nt, synthetic construct
  misc_feature 1..145: note = Description of Artificial Sequence: Synthetic polynucleotide
  source 1..145: mol_type = other RNA
tttggtgactgccacgcccagttttagagctagaaatagcaagttaaaataaggctagtccgttatcaacttgaaaaagtggcaccgagtcggtgcggtggggactgcggaggccagcagtgaacaccctttgggcgtggcagtc

SEQ ID NO: 4037 - RNA, 145 nt, synthetic construct
  misc_feature 1..145: note = Description of Artificial Sequence: Synthetic polynucleotide
  source 1..145: mol_type = other RNA
tttggtgactgccacgcccagttttagagctagaaatagcaagttaaaataaggctagtccgttatcaacttgaaaaagtggcaccgagtcggtgctggggactgcggaggccagcagtgaacaccccttgggcgtggcagtcac

SEQ ID NO: 4038 - RNA, 145 nt, synthetic construct
  misc_feature 1..145: note = Description of Artificial Sequence: Synthetic polynucleotide
  source 1..145: mol_type = other RNA
tttggtgactgccacgcccagttttagagctagaaatagcaagttaaaataaggctagtccgttatcaacttgaaaaagtggcaccgagtcggtgcgtggggactgcggaggccagcagtgaacaccctttgggcgtggcagtca

SEQ ID NO: 4039 - RNA, 145 nt, synthetic construct
  misc_feature 1..145: note = Description of Artificial Sequence: Synthetic polynucleotide
  source 1..145: mol_type = other RNA
gtttggtgactgccacgcccagttttagagctagaaatagcaagttaaaataaggctagtccgttatcaacttgaaaaagtggcaccgagtcggtgcactgcggaggccagcagtgaacacccattgggcgtggcagtttttttt

SEQ ID NO: 4040 - RNA, 145 nt, synthetic construct
  misc_feature 1..145: note = Description of Artificial Sequence: Synthetic polynucleotide
  source 1..145: mol_type = other RNA
tttggtgactgccacgcccagttttagagctagaaatagcaagttaaaataaggctagtccgttatcaacttgaaaaagtggcaccgagtcggtgcgtggtggggactgcggaggccagcagtgaacacccattgggcgtggcag

SEQ ID NO: 4041 - RNA, 145 nt, synthetic construct
  misc_feature 1..145: note = Description of Artificial Sequence: Synthetic polynucleotide
  source 1..145: mol_type = other RNA
gtttggtgactgccacgcccagttttagagctagaaatagcaagttaaaataaggctagtccgttatcaacttgaaaaagtggcaccgagtcggtgcggactgcggaggccagcagtgaacaccccttgggcgtggcattttttt

SEQ ID NO: 4042 - RNA, 145 nt, synthetic construct
  misc_feature 1..145: note = Description of Artificial Sequence: Synthetic polynucleotide
  source 1..145: mol_type = other RNA
gtttggtgactgccacgcccagttttagagctagaaatagcaagttaaaataaggctagtccgttatcaacttgaaaaagtggcaccgagtcggtgcggactgcggaggccagcagtgaacaccctttgggcgtggcattttttt

SEQ ID NO: 4043 - RNA, 145 nt, synthetic construct
  misc_feature 1..145: note = Description of Artificial Sequence: Synthetic polynucleotide
  source 1..145: mol_type = other RNA
gtttggtgactgccacgcccagttttagagctagaaatagcaagttaaaataaggctagtccgttatcaacttgaaaaagtggcaccgagtcggtgcggactgcggaggccagcagtgaacacccgttgggcgtggcattttttt

SEQ ID NO: 4044 - RNA, 145 nt, synthetic construct
  misc_feature 1..145: note = Description of Artificial Sequence: Synthetic polynucleotide
  source 1..145: mol_type = other RNA
gtttggtgactgccacgcccagttttagagctagaaatagcaagttaaaataaggctagtccgttatcaacttgaaaaagtggcaccgagtcggtgcgcggaggccagcagtgaacacccattgggcgtggcagtcacttttttt

SEQ ID NO: 4045 - RNA, 145 nt, synthetic construct
  misc_feature 1..145: note = Description of Artificial Sequence: Synthetic polynucleotide
  source 1..145: mol_type = other RNA
gtttggtgactgccacgcccagttttagagctagaaatagcaagttaaaataaggctagtccgttatcaacttgaaaaagtggcaccgagtcggtgctgcggaggccagcagtgaacaccctttgggcgtggcagtcattttttt

SEQ ID NO: 4046 - RNA, 145 nt, synthetic construct
  misc_feature 1..145: note = Description of Artificial Sequence: Synthetic polynucleotide
  source 1..145: mol_type = other RNA
gtttggtgactgccacgcccagttttagagctagaaatagcaagttaaaataaggctagtccgttatcaacttgaaaaagtggcaccgagtcggtgctgcggaggccagcagtgaacaccccttgggcgtggcagtcattttttt

SEQ ID NO: 4047 - RNA, 145 nt, synthetic construct
  misc_feature 1..145: note = Description of Artificial Sequence: Synthetic polynucleotide
  source 1..145: mol_type = other RNA
gtttggtgactgccacgcccagttttagagctagaaatagcaagttaaaataaggctagtccgttatcaacttgaaaaagtggcaccgagtcggtgcactgcggaggccagcagtgaacaccccttgggcgtggcagtttttttt

SEQ ID NO: 4048 - RNA, 145 nt, synthetic construct
  misc_feature 1..145: note = Description of Artificial Sequence: Synthetic polynucleotide
  source 1..145: mol_type = other RNA
gtttggtgactgccacgcccagttttagagctagaaatagcaagttaaaataaggctagtccgttatcaacttgaaaaagtggcaccgagtcggtgcactgcggaggccagcagtgaacaccctttgggcgtggcagtttttttt

SEQ ID NO: 4049 - RNA, 145 nt, synthetic construct
  misc_feature 1..145: note = Description of Artificial Sequence: Synthetic polynucleotide
  source 1..145: mol_type = other RNA
gtttggtgactgccacgcccagttttagagctagaaatagcaagttaaaataaggctagtccgttatcaacttgaaaaagtggcaccgagtcggtgcgcggaggccagcagtgaacaccccttgggcgtggcagtcacttttttt

SEQ ID NO: 4050 - RNA, 145 nt, synthetic construct
  misc_feature 1..145: note = Description of Artificial Sequence: Synthetic polynucleotide
  source 1..145: mol_type = other RNA
gtttggtgactgccacgcccagttttagagctagaaatagcaagttaaaataaggctagtccgttatcaacttgaaaaagtggcaccgagtcggtgcgggactgcggaggccagcagtgaacaccctttgggcgtggcttttttt

SEQ ID NO: 4051 - RNA, 145 nt, synthetic construct
  misc_feature 1..145: note = Description of Artificial Sequence: Synthetic polynucleotide
  source 1..145: mol_type = other RNA
gtttggtgactgccacgcccagttttagagctagaaatagcaagttaaaataaggctagtccgttatcaacttgaaaaagtggcaccgagtcggtgcgactgcggaggccagcagtgaacaccctttgggcgtggcagttttttt

SEQ ID NO: 4052 - RNA, 145 nt, synthetic construct
  misc_feature 1..145: note = Description of Artificial Sequence: Synthetic polynucleotide
  source 1..145: mol_type = other RNA
tttggtgactgccacgcccagttttagagctagaaatagcaagttaaaataaggctagtccgttatcaacttgaaaaagtggcaccgagtcggtgctggtggggactgcggaggccagcagtgaacacccattgggcgtggcagt

SEQ ID NO: 4053 - RNA, 145 nt, synthetic construct
  misc_feature 1..145: note = Description of Artificial Sequence: Synthetic polynucleotide
  source 1..145: mol_type = other RNA
gtttggtgactgccacgcccagttttagagctagaaatagcaagttaaaataaggctagtccgttatcaacttgaaaaagtggcaccgagtcggtgcgggactgcggaggccagcagtgaacacccgttgggcgtggcttttttt

SEQ ID NO: 4054 - RNA, 145 nt, synthetic construct
  misc_feature 1..145: note = Description of Artificial Sequence: Synthetic polynucleotide
  source 1..145: mol_type = other RNA
gtttggtgactgccacgcccagttttagagctagaaatagcaagttaaaataaggctagtccgttatcaacttgaaaaagtggcaccgagtcggtgcgggactgcggaggccagcagtgaacacccattgggcgtggcttttttt

SEQ ID NO: 4055 - RNA, 145 nt, synthetic construct
  misc_feature 1..145: note = Description of Artificial Sequence: Synthetic polynucleotide
  source 1..145: mol_type = other RNA
tttggtgactgccacgcccagttttagagctagaaatagcaagttaaaataaggctagtccgttatcaacttgaaaaagtggcaccgagtcggtgcgtggtggggactgcggaggccagcagtgaacacccgttgggcgtggcag

SEQ ID NO: 4056 - RNA, 145 nt, synthetic construct
  misc_feature 1..145: note = Description of Artificial Sequence: Synthetic polynucleotide
  source 1..145: mol_type = other RNA
tttggtgactgccacgcccagttttagagctagaaatagcaagttaaaataaggctagtccgttatcaacttgaaaaagtggcaccgagtcggtgcggtggggactgcggaggccagcagtgaacacccgttgggcgtggcagtc

SEQ ID NO: 4057 - RNA, 145 nt, synthetic construct
  misc_feature 1..145: note = Description of Artificial Sequence: Synthetic polynucleotide
  source 1..145: mol_type = other RNA
gtttggtgactgccacgcccagttttagagctagaaatagcaagttaaaataaggctagtccgttatcaacttgaaaaagtggcaccgagtcggtgcgcggaggccagcagtgaacaccctttgggcgtggcagtcacttttttt

SEQ ID NO: 4058 - RNA, 146 nt, synthetic construct
  misc_feature 1..146: note = Description of Artificial Sequence: Synthetic polynucleotide
  source 1..146: mol_type = other RNA
gtttggtgactgccacgcccagttttagagctagaaatagcaagttaaaataaggctagtccgttatcaacttgaaaaagtggcaccgagtcggtgcgactgcggaggccagcagtgaacacccattgggcgtggcagtttttttt

SEQ ID NO: 4059 - RNA, 146 nt, synthetic construct
  misc_feature 1..146: note = Description of Artificial Sequence: Synthetic polynucleotide
  source 1..146: mol_type = other RNA
gtttggtgactgccacgcccagttttagagctagaaatagcaagttaaaataaggctagtccgttatcaacttgaaaaagtggcaccgagtcggtgcggactgcggaggccagcagtgaacacccattgggcgtggcagttttttt

SEQ ID NO: 4060 - RNA, 146 nt, synthetic construct
  misc_feature 1..146: note = Description of Artificial Sequence: Synthetic polynucleotide
  source 1..146: mol_type = other RNA
tttggtgactgccacgcccagttttagagctagaaatagcaagttaaaataaggctagtccgttatcaacttgaaaaagtggcaccgagtcggtgcgtggggactgcggaggccagcagtgaacacccattgggcgtggcagtcac

SEQ ID NO: 4061 - RNA, 146 nt, synthetic construct
  misc_feature 1..146: note = Description of Artificial Sequence: Synthetic polynucleotide
  source 1..146: mol_type = other RNA
tttggtgactgccacgcccagttttagagctagaaatagcaagttaaaataaggctagtccgttatcaacttgaaaaagtggcaccgagtcggtgcgtggggactgcggaggccagcagtgaacaccctttgggcgtggcagtcac

SEQ ID NO: 4062 - RNA, 146 nt, synthetic construct
  misc_feature 1..146: note = Description of Artificial Sequence: Synthetic polynucleotide
  source 1..146: mol_type = other RNA
gtttggtgactgccacgcccagttttagagctagaaatagcaagttaaaataaggctagtccgttatcaacttgaaaaagtggcaccgagtcggtgcgggactgcggaggccagcagtgaacacccattgggcgtggcattttttt

SEQ ID NO: 4063 - RNA, 146 nt, synthetic construct
  misc_feature 1..146: note = Description of Artificial Sequence: Synthetic polynucleotide
  source 1..146: mol_type = other RNA
gtttggtgactgccacgcccagttttagagctagaaatagcaagttaaaataaggctagtccgttatcaacttgaaaaagtggcaccgagtcggtgcgactgcggaggccagcagtgaacaccctttgggcgtggcagtttttttt

SEQ ID NO: 4064 - RNA, 146 nt, synthetic construct
  misc_feature 1..146: note = Description of Artificial Sequence: Synthetic polynucleotide
  source 1..146: mol_type = other RNA
gtttggtgactgccacgcccagttttagagctagaaatagcaagttaaaataaggctagtccgttatcaacttgaaaaagtggcaccgagtcggtgcactgcggaggccagcagtgaacacccattgggcgtggcagtcttttttt

SEQ ID NO: 4065 - RNA, 146 nt, synthetic construct
  misc_feature 1..146: note = Description of Artificial Sequence: Synthetic polynucleotide
  source 1..146: mol_type = other RNA
gtttggtgactgccacgcccagttttagagctagaaatagcaagttaaaataaggctagtccgttatcaacttgaaaaagtggcaccgagtcggtgcggactgcggaggccagcagtgaacaccccttgggcgtggcagttttttt

SEQ ID NO: 4066 - RNA, 146 nt, synthetic construct
  misc_feature 1..146: note = Description of Artificial Sequence: Synthetic polynucleotide
  source 1..146: mol_type = other RNA
tttggtgactgccacgcccagttttagagctagaaatagcaagttaaaataaggctagtccgttatcaacttgaaaaagtggcaccgagtcggtgcgtggtggggactgcggaggccagcagtgaacacccattgggcgtggcagt

SEQ ID NO: 4067 - RNA, 146 nt, synthetic construct
  misc_feature 1..146: note = Description of Artificial Sequence: Synthetic polynucleotide
  source 1..146: mol_type = other RNA
tttggtgactgccacgcccagttttagagctagaaatagcaagttaaaataaggctagtccgttatcaacttgaaaaagtggcaccgagtcggtgctggggactgcggaggccagcagtgaacaccccttgggcgtggcagtcacc

SEQ ID NO: 4068 - RNA, 146 nt, synthetic construct
  misc_feature 1..146: note = Description of Artificial Sequence: Synthetic polynucleotide
  source 1..146: mol_type = other RNA
gtttggtgactgccacgcccagttttagagctagaaatagcaagttaaaataaggctagtccgttatcaacttgaaaaagtggcaccgagtcggtgcgcggaggccagcagtgaacaccccttgggcgtggcagtcaccttttttt

SEQ ID NO: 4069 - RNA, 146 nt, synthetic construct
  misc_feature 1..146: note = Description of Artificial Sequence: Synthetic polynucleotide
  source 1..146: mol_type = other RNA
gtttggtgactgccacgcccagttttagagctagaaatagcaagttaaaataaggctagtccgttatcaacttgaaaaagtggcaccgagtcggtgcgggactgcggaggccagcagtgaacaccctttgggcgtggcattttttt

SEQ ID NO: 4070 - RNA, 146 nt, synthetic construct
  misc_feature 1..146: note = Description of Artificial Sequence: Synthetic polynucleotide
  source 1..146: mol_type = other RNA
tttggtgactgccacgcccagttttagagctagaaatagcaagttaaaataaggctagtccgttatcaacttgaaaaagtggcaccgagtcggtgcgtggggactgcggaggccagcagtgaacacccgttgggcgtggcagtcac

SEQ ID NO: 4071 - RNA, 146 nt, synthetic construct
  misc_feature 1..146: note = Description of Artificial Sequence: Synthetic polynucleotide
  source 1..146: mol_type = other RNA
gtttggtgactgccacgcccagttttagagctagaaatagcaagttaaaataaggctagtccgttatcaacttgaaaaagtggcaccgagtcggtgcactgcggaggccagcagtgaacaccctttgggcgtggcagtcttttttt

SEQ ID NO: 4072 - RNA, 146 nt, synthetic construct
  misc_feature 1..146: note = Description of Artificial Sequence: Synthetic polynucleotide
  source 1..146: mol_type = other RNA
gtttggtgactgccacgcccagttttagagctagaaatagcaagttaaaataaggctagtccgttatcaacttgaaaaagtggcaccgagtcggtgctgcggaggccagcagtgaacaccccttgggcgtggcagtcacttttttt

SEQ ID NO: 4073 - RNA, 146 nt, synthetic construct
  misc_feature 1..146: note = Description of Artificial Sequence: Synthetic polynucleotide
  source 1..146: mol_type = other RNA
gtttggtgactgccacgcccagttttagagctagaaatagcaagttaaaataaggctagtccgttatcaacttgaaaaagtggcaccgagtcggtgctgcggaggccagcagtgaacacccgttgggcgtggcagtcacttttttt

SEQ ID NO: 4074 - RNA, 146 nt, synthetic construct
  misc_feature 1..146: note = Description of Artificial Sequence: Synthetic polynucleotide
  source 1..146: mol_type = other RNA
gtttggtgactgccacgcccagttttagagctagaaatagcaagttaaaataaggctagtccgttatcaacttgaaaaagtggcaccgagtcggtgcactgcggaggccagcagtgaacacccgttgggcgtggcagtcttttttt

SEQ ID NO: 4075 - RNA, 146 nt, synthetic construct
  misc_feature 1..146: note = Description of Artificial Sequence: Synthetic polynucleotide
  source 1..146: mol_type = other RNA
gtttggtgactgccacgcccagttttagagctagaaatagcaagttaaaataaggctagtccgttatcaacttgaaaaagtggcaccgagtcggtgctgcggaggccagcagtgaacacccattgggcgtggcagtcacttttttt

SEQ ID NO: 4076 - RNA, 146 nt, synthetic construct
  misc_feature 1..146: note = Description of Artificial Sequence: Synthetic polynucleotide
  source 1..146: mol_type = other RNA
gtttggtgactgccacgcccagttttagagctagaaatagcaagttaaaataaggctagtccgttatcaacttgaaaaagtggcaccgagtcggtgcgactgcggaggccagcagtgaacaccccttgggcgtggcagtttttttt

SEQ ID NO: 4077 - RNA, 146 nt, synthetic construct
  misc_feature 1..146: note = Description of Artificial Sequence: Synthetic polynucleotide
  source 1..146: mol_type = other RNA
tttggtgactgccacgcccagttttagagctagaaatagcaagttaaaataaggctagtccgttatcaacttgaaaaagtggcaccgagtcggtgcgtggggactgcggaggccagcagtgaacaccccttgggcgtggcagtcac

SEQ ID NO: 4078 - RNA, 146 nt, synthetic construct
  misc_feature 1..146: note = Description of Artificial Sequence: Synthetic polynucleotide
  source 1..146: mol_type = other RNA
tttggtgactgccacgcccagttttagagctagaaatagcaagttaaaataaggctagtccgttatcaacttgaaaaagtggcaccgagtcggtgctggtggggactgcggaggccagcagtgaacaccccttgggcgtggcagtc

SEQ ID NO: 4079 - RNA, 146 nt, synthetic construct
  misc_feature 1..146: note = Description of Artificial Sequence: Synthetic polynucleotide
  source 1..146: mol_type = other RNA
gtttggtgactgccacgcccagttttagagctagaaatagcaagttaaaataaggctagtccgttatcaacttgaaaaagtggcaccgagtcggtgcggggactgcggaggccagcagtgaacacccgttgggcgtggcttttttt

SEQ ID NO: 4080 - RNA, 146 nt, synthetic construct
  misc_feature 1..146: note = Description of Artificial Sequence: Synthetic polynucleotide
  source 1..146: mol_type = other RNA
tttggtgactgccacgcccagttttagagctagaaatagcaagttaaaataaggctagtccgttatcaacttgaaaaagtggcaccgagtcggtgctggggactgcggaggccagcagtgaacacccgttgggcgtggcagtcacc

SEQ ID NO: 4081 - RNA, 146 nt, synthetic construct
  misc_feature 1..146: note = Description of Artificial Sequence: Synthetic polynucleotide
  source 1..146: mol_type = other RNA
tttggtgactgccacgcccagttttagagctagaaatagcaagttaaaataaggctagtccgttatcaacttgaaaaagtggcaccgagtcggtgcgtggtggggactgcggaggccagcagtgaacacccgttgggcgtggcagt

SEQ ID NO: 4082 - RNA, 146 nt, synthetic construct
  misc_feature 1..146: note = Description of Artificial Sequence: Synthetic polynucleotide
  source 1..146: mol_type = other RNA
tttggtgactgccacgcccagttttagagctagaaatagcaagttaaaataaggctagtccgttatcaacttgaaaaagtggcaccgagtcggtgcgtggtggggactgcggaggccagcagtgaacaccctttgggcgtggcagt

SEQ ID NO: 4083 - RNA, 146 nt, synthetic construct
  misc_feature 1..146: note = Description of Artificial Sequence: Synthetic polynucleotide
  source 1..146: mol_type = other RNA
tttggtgactgccacgcccagttttagagctagaaatagcaagttaaaataaggctagtccgttatcaacttgaaaaagtggcaccgagtcggtgctggtggggactgcggaggccagcagtgaacacccgttgggcgtggcagtc

SEQ ID NO: 4084 - RNA, 146 nt, synthetic construct
  misc_feature 1..146: note = Description of Artificial Sequence: Synthetic polynucleotide
  source 1..146: mol_type = other RNA
tttggtgactgccacgcccagttttagagctagaaatagcaagttaaaataaggctagtccgttatcaacttgaaaaagtggcaccgagtcggtgctggtggggactgcggaggccagcagtgaacacccattgggcgtggcagtc

SEQ ID NO: 4085 - RNA, 146 nt, synthetic construct
  misc_feature 1..146: note = Description of Artificial Sequence: Synthetic polynucleotide
  source 1..146: mol_type = other RNA
tttggtgactgccacgcccagttttagagctagaaatagcaagttaaaataaggctagtccgttatcaacttgaaaaagtggcaccgagtcggtgcggtggggactgcggaggccagcagtgaacaccctttgggcgtggcagtca

SEQ ID NO: 4086 - RNA, 146 nt, synthetic construct
  misc_feature 1..146: note = Description of Artificial Sequence: Synthetic polynucleotide
  source 1..146: mol_type = other RNA
tttggtgactgccacgcccagttttagagctagaaatagcaagttaaaataaggctagtccgttatcaacttgaaaaagtggcaccgagtcggtgctggtggggactgcggaggccagcagtgaacaccctttgggcgtggcagtc

SEQ ID NO: 4087 - RNA, 146 nt, synthetic construct
  misc_feature 1..146: note = Description of Artificial Sequence: Synthetic polynucleotide
  source 1..146: mol_type = other RNA
tttggtgactgccacgcccagttttagagctagaaatagcaagttaaaataaggctagtccgttatcaacttgaaaaagtggcaccgagtcggtgctggggactgcggaggccagcagtgaacacccattgggcgtggcagtcacc

SEQ ID NO: 4088 - RNA, 146 nt, synthetic construct
  misc_feature 1..146: note = Description of Artificial Sequence: Synthetic polynucleotide
  source 1..146: mol_type = other RNA
tttggtgactgccacgcccagttttagagctagaaatagcaagttaaaataaggctagtccgttatcaacttgaaaaagtggcaccgagtcggtgcggtggggactgcggaggccagcagtgaacacccgttgggcgtggcagtca

SEQ ID NO: 4089 - RNA, 146 nt, synthetic construct
  misc_feature 1..146: note = Description of Artificial Sequence: Synthetic polynucleotide
  source 1..146: mol_type = other RNA
tttggtgactgccacgcccagttttagagctagaaatagcaagttaaaataaggctagtccgttatcaacttgaaaaagtggcaccgagtcggtgcggtggggactgcggaggccagcagtgaacaccccttgggcgtggcagtca

SEQ ID NO: 4090 - RNA, 146 nt, synthetic construct
  misc_feature 1..146: note = Description of Artificial Sequence: Synthetic polynucleotide
  source 1..146: mol_type = other RNA
tttggtgactgccacgcccagttttagagctagaaatagcaagttaaaataaggctagtccgttatcaacttgaaaaagtggcaccgagtcggtgctggggactgcggaggccagcagtgaacaccctttgggcgtggcagtcacc

SEQ ID NO: 4091 - RNA, 146 nt, synthetic construct
  misc_feature 1..146: note = Description of Artificial Sequence: Synthetic polynucleotide
  source 1..146: mol_type = other RNA
gtttggtgactgccacgcccagttttagagctagaaatagcaagttaaaataaggctagtccgttatcaacttgaaaaagtggcaccgagtcggtgctgcggaggccagcagtgaacaccctttgggcgtggcagtcacttttttt

SEQ ID NO: 4092 - RNA, 146 nt, synthetic construct
  misc_feature 1..146: note = Description of Artificial Sequence: Synthetic polynucleotide
  source 1..146: mol_type = other RNA
gtttggtgactgccacgcccagttttagagctagaaatagcaagttaaaataaggctagtccgttatcaacttgaaaaagtggcaccgagtcggtgcgggactgcggaggccagcagtgaacaccccttgggcgtggcattttttt

SEQ ID NO: 4093 - RNA, 146 nt, synthetic construct
  misc_feature 1..146: note = Description of Artificial Sequence: Synthetic polynucleotide
  source 1..146: mol_type = other RNA
gtttggtgactgccacgcccagttttagagctagaaatagcaagttaaaataaggctagtccgttatcaacttgaaaaagtggcaccgagtcggtgcggggactgcggaggccagcagtgaacaccccttgggcgtggcttttttt

SEQ ID NO: 4094 - RNA, 146 nt, synthetic construct
  misc_feature 1..146: note = Description of Artificial Sequence: Synthetic polynucleotide
  source 1..146: mol_type = other RNA
gtttggtgactgccacgcccagttttagagctagaaatagcaagttaaaataaggctagtccgttatcaacttgaaaaagtggcaccgagtcggtgcactgcggaggccagcagtgaacaccccttgggcgtggcagtcttttttt

SEQ ID NO: 4095 - RNA, 146 nt, synthetic construct
  misc_feature 1..146: note = Description of Artificial Sequence: Synthetic polynucleotide
  source 1..146: mol_type = other RNA
gtttggtgactgccacgcccagttttagagctagaaatagcaagttaaaataaggctagtccgttatcaacttgaaaaagtggcaccgagtcggtgcggactgcggaggccagcagtgaacacccgttgggcgtggcagttttttt

SEQ ID NO: 4096 - RNA, 146 nt, synthetic construct
  misc_feature 1..146: note = Description of Artificial Sequence: Synthetic polynucleotide
  source 1..146: mol_type = other RNA
gtttggtgactgccacgcccagttttagagctagaaatagcaagttaaaataaggctagtccgttatcaacttgaaaaagtggcaccgagtcggtgcgcggaggccagcagtgaacacccgttgggcgtggcagtcaccttttttt

SEQ ID NO: 4097 - RNA, 146 nt, synthetic construct
  misc_feature 1..146: note = Description of Artificial Sequence: Synthetic polynucleotide
  source 1..146: mol_type = other RNA
gtttggtgactgccacgcccagttttagagctagaaatagcaagttaaaataaggctagtccgttatcaacttgaaaaagtggcaccgagtcggtgcggggactgcggaggccagcagtgaacacccattgggcgtggcttttttt

SEQ ID NO: 4098 - RNA, 146 nt, synthetic construct
  misc_feature 1..146: note = Description of Artificial Sequence: Synthetic polynucleotide
  source 1..146: mol_type = other RNA
gtttggtgactgccacgcccagttttagagctagaaatagcaagttaaaataaggctagtccgttatcaacttgaaaaagtggcaccgagtcggtgcgcggaggccagcagtgaacacccattgggcgtggcagtcaccttttttt

SEQ ID NO: 4099 - RNA, 146 nt, synthetic construct
  misc_feature 1..146: note = Description of Artificial Sequence: Synthetic polynucleotide
  source 1..146: mol_type = other RNA
gtttggtgactgccacgcccagttttagagctagaaatagcaagttaaaataaggctagtccgttatcaacttgaaaaagtggcaccgagtcggtgcggggactgcggaggccagcagtgaacaccctttgggcgtggcttttttt

SEQ ID NO: 4100 - RNA, 146 nt, synthetic construct
  misc_feature 1..146: note = Description of Artificial Sequence: Synthetic polynucleotide
  source 1..146: mol_type = other RNA
gtttggtgactgccacgcccagttttagagctagaaatagcaagttaaaataaggctagtccgttatcaacttgaaaaagtggcaccgagtcggtgcgggactgcggaggccagcagtgaacacccgttgggcgtggcattttttt

SEQ ID NO: 4101 - RNA, 146 nt, synthetic construct
  misc_feature 1..146: note = Description of Artificial Sequence: Synthetic polynucleotide
  source 1..146: mol_type = other RNA
gtttggtgactgccacgcccagttttagagctagaaatagcaagttaaaataaggctagtccgttatcaacttgaaaaagtggcaccgagtcggtgcgcggaggccagcagtgaacaccctttgggcgtggcagtcaccttttttt

SEQ ID NO: 4102 - RNA, 146 nt, synthetic construct
  misc_feature 1..146: note = Description of Artificial Sequence: Synthetic polynucleotide
  source 1..146: mol_type = other RNA
tttggtgactgccacgcccagttttagagctagaaatagcaagttaaaataaggctagtccgttatcaacttgaaaaagtggcaccgagtcggtgcggtggggactgcggaggccagcagtgaacacccattgggcgtggcagtca

SEQ ID NO: 4103 - RNA, 146 nt, synthetic construct
  misc_feature 1..146: note = Description of Artificial Sequence: Synthetic polynucleotide
  source 1..146: mol_type = other RNA
gtttggtgactgccacgcccagttttagagctagaaatagcaagttaaaataaggctagtccgttatcaacttgaaaaagtggcaccgagtcggtgcgactgcggaggccagcagtgaacacccgttgggcgtggcagtttttttt

SEQ ID NO: 4104 - RNA, 146 nt, synthetic construct
  misc_feature 1..146: note = Description of Artificial Sequence: Synthetic polynucleotide
  source 1..146: mol_type = other RNA
gtttggtgactgccacgcccagttttagagctagaaatagcaagttaaaataaggctagtccgttatcaacttgaaaaagtggcaccgagtcggtgcggactgcggaggccagcagtgaacaccctttgggcgtggcagttttttt

SEQ ID NO: 4105 - RNA, 146 nt, synthetic construct
  misc_feature 1..146: note = Description of Artificial Sequence: Synthetic polynucleotide
  source 1..146: mol_type = other RNA
tttggtgactgccacgcccagttttagagctagaaatagcaagttaaaataaggctagtccgttatcaacttgaaaaagtggcaccgagtcggtgcgtggtggggactgcggaggccagcagtgaacaccccttgggcgtggcagt

SEQ ID NO: 4106 - RNA, 147 nt, synthetic construct
  misc_feature 1..147: note = Description of Artificial Sequence: Synthetic polynucleotide
  source 1..147: mol_type = other RNA
tttggtgactgccacgcccagttttagagctagaaatagcaagttaaaataaggctagtccgttatcaacttgaaaaagtggcaccgagtcggtgctggtggggactgcggaggccagcagtgaacacccgttgggcgtggcagtca

SEQ ID NO: 4107 - RNA, 147 nt, synthetic construct
  misc_feature 1..147: note = Description of Artificial Sequence: Synthetic polynucleotide
  source 1..147: mol_type = other RNA
gtttggtgactgccacgcccagttttagagctagaaatagcaagttaaaataaggctagtccgttatcaacttgaaaaagtggcaccgagtcggtgcggggactgcggaggccagcagtgaacacccattgggcgtggcattttttt

SEQ ID NO: 4108 - RNA, 147 nt, synthetic construct
  misc_feature 1..147: note = Description of Artificial Sequence: Synthetic polynucleotide
  source 1..147: mol_type = other RNA
tttggtgactgccacgcccagttttagagctagaaatagcaagttaaaataaggctagtccgttatcaacttgaaaaagtggcaccgagtcggtgcgtggtggggactgcggaggccagcagtgaacacccattgggcgtggcagtc

SEQ ID NO: 4109 - RNA, 147 nt, synthetic construct
  misc_feature 1..147: note = Description of Artificial Sequence: Synthetic polynucleotide
  source 1..147: mol_type = other RNA
tttggtgactgccacgcccagttttagagctagaaatagcaagttaaaataaggctagtccgttatcaacttgaaaaagtggcaccgagtcggtgcgtggtggggactgcggaggccagcagtgaacacccgttgggcgtggcagtc

SEQ ID NO: 4110 - RNA, 147 nt, synthetic construct
  misc_feature 1..147: note = Description of Artificial Sequence: Synthetic polynucleotide
  source 1..147: mol_type = other RNA
tttggtgactgccacgcccagttttagagctagaaatagcaagttaaaataaggctagtccgttatcaacttgaaaaagtggcaccgagtcggtgcgtggtggggactgcggaggccagcagtgaacaccccttgggcgtggcagtc

SEQ ID NO: 4111 - RNA, 147 nt, synthetic construct
  misc_feature 1..147: note = Description of Artificial Sequence: Synthetic polynucleotide
  source 1..147: mol_type = other RNA
gtttggtgactgccacgcccagttttagagctagaaatagcaagttaaaataaggctagtccgttatcaacttgaaaaagtggcaccgagtcggtgcgactgcggaggccagcagtgaacaccccttgggcgtggcagtcttttttt

SEQ ID NO: 4112 - RNA, 147 nt, synthetic construct
  misc_feature 1..147: note = Description of Artificial Sequence: Synthetic polynucleotide
  source 1..147: mol_type = other RNA
gtttggtgactgccacgcccagttttagagctagaaatagcaagttaaaataaggctagtccgttatcaacttgaaaaagtggcaccgagtcggtgcggactgcggaggccagcagtgaacaccccttgggcgtggcagtttttttt

SEQ ID NO: 4113 - RNA, 147 nt, synthetic construct
  misc_feature 1..147: note = Description of Artificial Sequence: Synthetic polynucleotide
  source 1..147: mol_type = other RNA
gtttggtgactgccacgcccagttttagagctagaaatagcaagttaaaataaggctagtccgttatcaacttgaaaaagtggcaccgagtcggtgctggggactgcggaggccagcagtgaacaccctttgggcgtggcttttttt

SEQ ID NO: 4114 - RNA, 147 nt, synthetic construct
  misc_feature 1..147: note = Description of Artificial Sequence: Synthetic polynucleotide
  source 1..147: mol_type = other RNA
tttggtgactgccacgcccagttttagagctagaaatagcaagttaaaataaggctagtccgttatcaacttgaaaaagtggcaccgagtcggtgcgtggggactgcggaggccagcagtgaacaccctttgggcgtggcagtcacc

SEQ ID NO: 4115 - RNA, 147 nt, synthetic construct
  misc_feature 1..147: note = Description of Artificial Sequence: Synthetic polynucleotide
  source 1..147: mol_type = other RNA
tttggtgactgccacgcccagttttagagctagaaatagcaagttaaaataaggctagtccgttatcaacttgaaaaagtggcaccgagtcggtgctggtggggactgcggaggccagcagtgaacaccccttgggcgtggcagtca

SEQ ID NO: 4116 - RNA, 147 nt, synthetic construct
  misc_feature 1..147: note = Description of Artificial Sequence: Synthetic polynucleotide
  source 1..147: mol_type = other RNA
gtttggtgactgccacgcccagttttagagctagaaatagcaagttaaaataaggctagtccgttatcaacttgaaaaagtggcaccgagtcggtgctggggactgcggaggccagcagtgaacacccattgggcgtggcttttttt

SEQ ID NO: 4117 - RNA, 147 nt, synthetic construct
  misc_feature 1..147: note = Description of Artificial Sequence: Synthetic polynucleotide
  source 1..147: mol_type = other RNA
tttggtgactgccacgcccagttttagagctagaaatagcaagttaaaataaggctagtccgttatcaacttgaaaaagtggcaccgagtcggtgcgtggggactgcggaggccagcagtgaacacccattgggcgtggcagtcacc

SEQ ID NO: 4118 - RNA, 147 nt, synthetic construct
  misc_feature 1..147: note = Description of Artificial Sequence: Synthetic polynucleotide
  source 1..147: mol_type = other RNA
tttggtgactgccacgcccagttttagagctagaaatagcaagttaaaataaggctagtccgttatcaacttgaaaaagtggcaccgagtcggtgcgtggggactgcggaggccagcagtgaacacccgttgggcgtggcagtcacc

SEQ ID NO: 4119 - RNA, 147 nt, synthetic construct
  misc_feature 1..147: note = Description of Artificial Sequence: Synthetic polynucleotide
  source 1..147: mol_type = other RNA
tttggtgactgccacgcccagttttagagctagaaatagcaagttaaaataaggctagtccgttatcaacttgaaaaagtggcaccgagtcggtgcgtggtggggactgcggaggccagcagtgaacaccctttgggcgtggcagtc

SEQ ID NO: 4120 - RNA, 147 nt, synthetic construct
  misc_feature 1..147: note = Description of Artificial Sequence: Synthetic polynucleotide
  source 1..147: mol_type = other RNA
gtttggtgactgccacgcccagttttagagctagaaatagcaagttaaaataaggctagtccgttatcaacttgaaaaagtggcaccgagtcggtgctgcggaggccagcagtgaacacccattgggcgtggcagtcaccttttttt

SEQ ID NO: 4121 - RNA, 147 nt, synthetic construct
  misc_feature 1..147: note = Description of Artificial Sequence: Synthetic polynucleotide
  source 1..147: mol_type = other RNA
gtttggtgactgccacgcccagttttagagctagaaatagcaagttaaaataaggctagtccgttatcaacttgaaaaagtggcaccgagtcggtgctggggactgcggaggccagcagtgaacaccccttgggcgtggcttttttt

SEQ ID NO: 4122 - RNA, 147 nt, synthetic construct
  misc_feature 1..147: note = Description of Artificial Sequence: Synthetic polynucleotide
  source 1..147: mol_type = other RNA
gtttggtgactgccacgcccagttttagagctagaaatagcaagttaaaataaggctagtccgttatcaacttgaaaaagtggcaccgagtcggtgcgactgcggaggccagcagtgaacacccgttgggcgtggcagtcttttttt

SEQ ID NO: 4123 - RNA, 147 nt, synthetic construct
  misc_feature 1..147: note = Description of Artificial Sequence: Synthetic polynucleotide
  source 1..147: mol_type = other RNA
gtttggtgactgccacgcccagttttagagctagaaatagcaagttaaaataaggctagtccgttatcaacttgaaaaagtggcaccgagtcggtgctggggactgcggaggccagcagtgaacacccgttgggcgtggcttttttt

SEQ ID NO: 4124 - RNA, 147 nt, synthetic construct
  misc_feature 1..147: note = Description of Artificial Sequence: Synthetic polynucleotide
  source 1..147: mol_type = other RNA
gtttggtgactgccacgcccagttttagagctagaaatagcaagttaaaataaggctagtccgttatcaacttgaaaaagtggcaccgagtcggtgcggactgcggaggccagcagtgaacaccctttgggcgtggcagtttttttt

SEQ ID NO: 4125 - RNA, 147 nt, synthetic construct
  misc_feature 1..147: note = Description of Artificial Sequence: Synthetic polynucleotide
  source 1..147: mol_type = other RNA
gtttggtgactgccacgcccagttttagagctagaaatagcaagttaaaataaggctagtccgttatcaacttgaaaaagtggcaccgagtcggtgcgggactgcggaggccagcagtgaacacccattgggcgtggcagttttttt

SEQ ID NO: 4126 - RNA, 147 nt, synthetic construct
  misc_feature 1..147: note = Description of Artificial Sequence: Synthetic polynucleotide
  source 1..147: mol_type = other RNA
gtttggtgactgccacgcccagttttagagctagaaatagcaagttaaaataaggctagtccgttatcaacttgaaaaagtggcaccgagtcggtgcgggactgcggaggccagcagtgaacaccctttgggcgtggcagttttttt

SEQ ID NO: 4127 - RNA, 147 nt, synthetic construct
  misc_feature 1..147: note = Description of Artificial Sequence: Synthetic polynucleotide
  source 1..147: mol_type = other RNA
gtttggtgactgccacgcccagttttagagctagaaatagcaagttaaaataaggctagtccgttatcaacttgaaaaagtggcaccgagtcggtgcggggactgcggaggccagcagtgaacacccgttgggcgtggcattttttt

SEQ ID NO: 4128 - RNA, 147 nt, synthetic construct
  misc_feature 1..147: note = Description of Artificial Sequence: Synthetic polynucleotide
  source 1..147: mol_type = other RNA
tttggtgactgccacgcccagttttagagctagaaatagcaagttaaaataaggctagtccgttatcaacttgaaaaagtggcaccgagtcggtgcggtggggactgcggaggccagcagtgaacacccgttgggcgtggcagtcac

SEQ ID NO: 4129 - RNA, 147 nt, synthetic construct
  misc_feature 1..147: note = Description of Artificial Sequence: Synthetic polynucleotide
  source 1..147: mol_type = other RNA
tttggtgactgccacgcccagttttagagctagaaatagcaagttaaaataaggctagtccgttatcaacttgaaaaagtggcaccgagtcggtgcggtggggactgcggaggccagcagtgaacaccctttgggcgtggcagtcac

SEQ ID NO: 4130 - RNA, 147 nt, synthetic construct
  misc_feature 1..147: note = Description of Artificial Sequence: Synthetic polynucleotide
  source 1..147: mol_type = other RNA
gtttggtgactgccacgcccagttttagagctagaaatagcaagttaaaataaggctagtccgttatcaacttgaaaaagtggcaccgagtcggtgctgcggaggccagcagtgaacaccctttgggcgtggcagtcaccttttttt

SEQ ID NO: 4131 - RNA, 147 nt, synthetic construct
  misc_feature 1..147: note = Description of Artificial Sequence: Synthetic polynucleotide
  source 1..147: mol_type = other RNA
gtttggtgactgccacgcccagttttagagctagaaatagcaagttaaaataaggctagtccgttatcaacttgaaaaagtggcaccgagtcggtgcactgcggaggccagcagtgaacacccgttgggcgtggcagtcattttttt

SEQ ID NO: 4132 - RNA, 147 nt, synthetic construct
  misc_feature 1..147: note = Description of Artificial Sequence: Synthetic polynucleotide
  source 1..147: mol_type = other RNA
tttggtgactgccacgcccagttttagagctagaaatagcaagttaaaataaggctagtccgttatcaacttgaaaaagtggcaccgagtcggtgctggtggggactgcggaggccagcagtgaacacccattgggcgtggcagtca

SEQ ID NO: 4133 - RNA, 147 nt, synthetic construct
  misc_feature 1..147: note = Description of Artificial Sequence: Synthetic polynucleotide
  source 1..147: mol_type = other RNA
gtttggtgactgccacgcccagttttagagctagaaatagcaagttaaaataaggctagtccgttatcaacttgaaaaagtggcaccgagtcggtgcggggactgcggaggccagcagtgaacaccctttgggcgtggcattttttt

SEQ ID NO: 4134 - RNA, 147 nt, synthetic construct
  misc_feature 1..147: note = Description of Artificial Sequence: Synthetic polynucleotide
  source 1..147: mol_type = other RNA
gtttggtgactgccacgcccagttttagagctagaaatagcaagttaaaataaggctagtccgttatcaacttgaaaaagtggcaccgagtcggtgcgactgcggaggccagcagtgaacaccctttgggcgtggcagtcttttttt

SEQ ID NO: 4135 - RNA, 147 nt, synthetic construct
  misc_feature 1..147: note = Description of Artificial Sequence: Synthetic polynucleotide
  source 1..147: mol_type = other RNA
gtttggtgactgccacgcccagttttagagctagaaatagcaagttaaaataaggctagtccgttatcaacttgaaaaagtggcaccgagtcggtgcgactgcggaggccagcagtgaacacccattgggcgtggcagtcttttttt

SEQ ID NO: 4136 - RNA, 147 nt, synthetic construct
  misc_feature 1..147: note = Description of Artificial Sequence: Synthetic polynucleotide
  source 1..147: mol_type = other RNA
tttggtgactgccacgcccagttttagagctagaaatagcaagttaaaataaggctagtccgttatcaacttgaaaaagtggcaccgagtcggtgcgtggggactgcggaggccagcagtgaacaccccttgggcgtggcagtcacc

SEQ ID NO: 4137 - RNA, 147 nt, synthetic construct
  misc_feature 1..147: note = Description of Artificial Sequence: Synthetic polynucleotide
  source 1..147: mol_type = other RNA
tttggtgactgccacgcccagttttagagctagaaatagcaagttaaaataaggctagtccgttatcaacttgaaaaagtggcaccgagtcggtgctggtggggactgcggaggccagcagtgaacaccctttgggcgtggcagtca

SEQ ID NO: 4138 - RNA, 147 nt, synthetic construct
  misc_feature 1..147: note = Description of Artificial Sequence: Synthetic polynucleotide
  source 1..147: mol_type = other RNA
gtttggtgactgccacgcccagttttagagctagaaatagcaagttaaaataaggctagtccgttatcaacttgaaaaagtggcaccgagtcggtgcggactgcggaggccagcagtgaacacccattgggcgtggcagtttttttt

SEQ ID NO: 4139 - RNA, 147 nt, synthetic construct
  misc_feature 1..147: note = Description of Artificial Sequence: Synthetic polynucleotide
  source 1..147: mol_type = other RNA
gtttggtgactgccacgcccagttttagagctagaaatagcaagttaaaataaggctagtccgttatcaacttgaaaaagtggcaccgagtcggtgcgggactgcggaggccagcagtgaacaccccttgggcgtggcagttttttt

SEQ ID NO: 4140 - RNA, 147 nt, synthetic construct
  misc_feature 1..147: note = Description of Artificial Sequence: Synthetic polynucleotide
  source 1..147: mol_type = other RNA
gtttggtgactgccacgcccagttttagagctagaaatagcaagttaaaataaggctagtccgttatcaacttgaaaaagtggcaccgagtcggtgctgcggaggccagcagtgaacacccgttgggcgtggcagtcaccttttttt

SEQ ID NO: 4141 - RNA, 147 nt, synthetic construct
  misc_feature 1..147: note = Description of Artificial Sequence: Synthetic polynucleotide
  source 1..147: mol_type = other RNA
gtttggtgactgccacgcccagttttagagctagaaatagcaagttaaaataaggctagtccgttatcaacttgaaaaagtggcaccgagtcggtgcactgcggaggccagcagtgaacaccccttgggcgtggcagtcattttttt

SEQ ID NO: 4142 - RNA, 147 nt, synthetic construct
  misc_feature 1..147: note = Description of Artificial Sequence: Synthetic polynucleotide
  source 1..147: mol_type = other RNA
tttggtgactgccacgcccagttttagagctagaaatagcaagttaaaataaggctagtccgttatcaacttgaaaaagtggcaccgagtcggtgcggtggggactgcggaggccagcagtgaacaccccttgggcgtggcagtcac

SEQ ID NO: 4143 - RNA, 147 nt, synthetic construct
  misc_feature 1..147: note = Description of Artificial Sequence: Synthetic polynucleotide
  source 1..147: mol_type = other RNA
gtttggtgactgccacgcccagttttagagctagaaatagcaagttaaaataaggctagtccgttatcaacttgaaaaagtggcaccgagtcggtgcgggactgcggaggccagcagtgaacacccgttgggcgtggcagttttttt

SEQ ID NO: 4144 - RNA, 147 nt, synthetic construct
  misc_feature 1..147: note = Description of Artificial Sequence: Synthetic polynucleotide
  source 1..147: mol_type = other RNA
gtttggtgactgccacgcccagttttagagctagaaatagcaagttaaaataaggctagtccgttatcaacttgaaaaagtggcaccgagtcggtgctgcggaggccagcagtgaacaccccttgggcgtggcagtcaccttttttt

SEQ ID NO: 4145 - RNA, 147 nt, synthetic construct
  misc_feature 1..147: note = Description of Artificial Sequence: Synthetic polynucleotide
  source 1..147: mol_type = other RNA
gtttggtgactgccacgcccagttttagagctagaaatagcaagttaaaataaggctagtccgttatcaacttgaaaaagtggcaccgagtcggtgcggactgcggaggccagcagtgaacacccgttgggcgtggcagtttttttt

SEQ ID NO: 4146 - RNA, 147 nt, synthetic construct
  misc_feature 1..147: note = Description of Artificial Sequence: Synthetic polynucleotide
  source 1..147: mol_type = other RNA
gtttggtgactgccacgcccagttttagagctagaaatagcaagttaaaataaggctagtccgttatcaacttgaaaaagtggcaccgagtcggtgcggggactgcggaggccagcagtgaacaccccttgggcgtggcattttttt

SEQ ID NO: 4147 - RNA, 147 nt, synthetic construct
  misc_feature 1..147: note = Description of Artificial Sequence: Synthetic polynucleotide
  source 1..147: mol_type = other RNA
tttggtgactgccacgcccagttttagagctagaaatagcaagttaaaataaggctagtccgttatcaacttgaaaaagtggcaccgagtcggtgcggtggggactgcggaggccagcagtgaacacccattgggcgtggcagtcac

SEQ ID NO: 4148 - RNA, 147 nt, synthetic construct
  misc_feature 1..147: note = Description of Artificial Sequence: Synthetic polynucleotide
  source 1..147: mol_type = other RNA
gtttggtgactgccacgcccagttttagagctagaaatagcaagttaaaataaggctagtccgttatcaacttgaaaaagtggcaccgagtcggtgcactgcggaggccagcagtgaacacccattgggcgtggcagtcattttttt

SEQ ID NO: 4149 - RNA, 147 nt, synthetic construct
  misc_feature 1..147: note = Description of Artificial Sequence: Synthetic polynucleotide
  source 1..147: mol_type = other RNA
gtttggtgactgccacgcccagttttagagctagaaatagcaagttaaaataaggctagtccgttatcaacttgaaaaagtggcaccgagtcggtgcactgcggaggccagcagtgaacaccctttgggcgtggcagtcattttttt

SEQ ID NO: 4150 - RNA, 148 nt, synthetic construct
  misc_feature 1..148: note = Description of Artificial Sequence: Synthetic polynucleotide
  source 1..148: mol_type = other RNA
gtttggtgactgccacgcccagttttagagctagaaatagcaagttaaaataaggctagtccgttatcaacttgaaaaagtggcaccgagtcggtgcgactgcggaggccagcagtgaacacccgttgggcgtggcagtcattttttt

SEQ ID NO: 4151 - RNA, 148 nt, synthetic construct
  misc_feature 1..148: note = Description of Artificial Sequence: Synthetic polynucleotide
  source 1..148: mol_type = other RNA
gtttggtgactgccacgcccagttttagagctagaaatagcaagttaaaataaggctagtccgttatcaacttgaaaaagtggcaccgagtcggtgcgggactgcggaggccagcagtgaacacccgttgggcgtggcagtttttttt

SEQ ID NO: 4152 - RNA, 148 nt, synthetic construct
  misc_feature 1..148: note = Description of Artificial Sequence: Synthetic polynucleotide
  source 1..148: mol_type = other RNA
gtttggtgactgccacgcccagttttagagctagaaatagcaagttaaaataaggctagtccgttatcaacttgaaaaagtggcaccgagtcggtgcgactgcggaggccagcagtgaacaccctttgggcgtggcagtcattttttt

SEQ ID NO: 4153 - RNA, 148 nt, synthetic construct
  misc_feature 1..148: note = Description of Artificial Sequence: Synthetic polynucleotide
  source 1..148: mol_type = other RNA
gtttggtgactgccacgcccagttttagagctagaaatagcaagttaaaataaggctagtccgttatcaacttgaaaaagtggcaccgagtcggtgcggggactgcggaggccagcagtgaacacccattgggcgtggcagttttttt

SEQ ID NO: 4154 - RNA, 148 nt, synthetic construct
  misc_feature 1..148: note = Description of Artificial Sequence: Synthetic polynucleotide
  source 1..148: mol_type = other RNA
gtttggtgactgccacgcccagttttagagctagaaatagcaagttaaaataaggctagtccgttatcaacttgaaaaagtggcaccgagtcggtgcgtggggactgcggaggccagcagtgaacaccccttgggcgtggcttttttt

SEQ ID NO: 4155 - RNA, 148 nt, synthetic construct
  misc_feature 1..148: note = Description of Artificial Sequence: Synthetic polynucleotide
  source 1..148: mol_type = other RNA
gtttggtgactgccacgcccagttttagagctagaaatagcaagttaaaataaggctagtccgttatcaacttgaaaaagtggcaccgagtcggtgcactgcggaggccagcagtgaacacccgttgggcgtggcagtcacttttttt

SEQ ID NO: 4156 - RNA, 148 nt, synthetic construct
  misc_feature 1..148: note = Description of Artificial Sequence: Synthetic polynucleotide
  source 1..148: mol_type = other RNA
gtttggtgactgccacgcccagttttagagctagaaatagcaagttaaaataaggctagtccgttatcaacttgaaaaagtggcaccgagtcggtgcactgcggaggccagcagtgaacaccctttgggcgtggcagtcacttttttt

SEQ ID NO: 4157 - RNA, 148 nt, synthetic construct
  misc_feature 1..148: note = Description of Artificial Sequence: Synthetic polynucleotide
  source 1..148: mol_type = other RNA
gtttggtgactgccacgcccagttttagagctagaaatagcaagttaaaataaggctagtccgttatcaacttgaaaaagtggcaccgagtcggtgcgggactgcggaggccagcagtgaacacccattgggcgtggcagtttttttt

SEQ ID NO: 4158 - RNA, 148 nt, synthetic construct
  misc_feature 1..148: note = Description of Artificial Sequence: Synthetic polynucleotide
  source 1..148: mol_type = other RNA
gtttggtgactgccacgcccagttttagagctagaaatagcaagttaaaataaggctagtccgttatcaacttgaaaaagtggcaccgagtcggtgcggggactgcggaggccagcagtgaacaccctttgggcgtggcagttttttt

SEQ ID NO: 4159 - RNA, 148 nt, synthetic construct
  misc_feature 1..148: note = Description of Artificial Sequence: Synthetic polynucleotide
  source 1..148: mol_type = other RNA
tttggtgactgccacgcccagttttagagctagaaatagcaagttaaaataaggctagtccgttatcaacttgaaaaagtggcaccgagtcggtgcgtggtggggactgcggaggccagcagtgaacaccccttgggcgtggcagtca

SEQ ID NO: 4160 - RNA, 148 nt, synthetic construct
  misc_feature 1..148: note = Description of Artificial Sequence: Synthetic polynucleotide
  source 1..148: mol_type = other RNA
gtttggtgactgccacgcccagttttagagctagaaatagcaagttaaaataaggctagtccgttatcaacttgaaaaagtggcaccgagtcggtgcgtggggactgcggaggccagcagtgaacaccctttgggcgtggcttttttt

SEQ ID NO: 4161 - RNA, 148 nt, synthetic construct
  misc_feature 1..148: note = Description of Artificial Sequence: Synthetic polynucleotide
  source 1..148: mol_type = other RNA
gtttggtgactgccacgcccagttttagagctagaaatagcaagttaaaataaggctagtccgttatcaacttgaaaaagtggcaccgagtcggtgctggggactgcggaggccagcagtgaacaccctttgggcgtggcattttttt

SEQ ID NO: 4162 - RNA, 148 nt, synthetic construct
  misc_feature 1..148: note = Description of Artificial Sequence: Synthetic polynucleotide
  source 1..148: mol_type = other RNA
gtttggtgactgccacgcccagttttagagctagaaatagcaagttaaaataaggctagtccgttatcaacttgaaaaagtggcaccgagtcggtgcggactgcggaggccagcagtgaacaccccttgggcgtggcagtcttttttt

SEQ ID NO: 4163 - RNA, 148 nt, synthetic construct
  misc_feature 1..148: note = Description of Artificial Sequence: Synthetic polynucleotide
  source 1..148: mol_type = other RNA
tttggtgactgccacgcccagttttagagctagaaatagcaagttaaaataaggctagtccgttatcaacttgaaaaagtggcaccgagtcggtgcggtggggactgcggaggccagcagtgaacacccattgggcgtggcagtcacc

SEQ ID NO: 4164 - RNA, 148 nt, synthetic construct
  misc_feature 1..148: note = Description of Artificial Sequence: Synthetic polynucleotide
  source 1..148: mol_type = other RNA
gtttggtgactgccacgcccagttttagagctagaaatagcaagttaaaataaggctagtccgttatcaacttgaaaaagtggcaccgagtcggtgcggactgcggaggccagcagtgaacacccattgggcgtggcagtcttttttt

SEQ ID NO: 4165 - RNA, 148 nt, synthetic construct
  misc_feature 1..148: note = Description of Artificial Sequence: Synthetic polynucleotide
  source 1..148: mol_type = other RNA
gtttggtgactgccacgcccagttttagagctagaaatagcaagttaaaataaggctagtccgttatcaacttgaaaaagtggcaccgagtcggtgcggactgcggaggccagcagtgaacaccctttgggcgtggcagtcttttttt

SEQ ID NO: 4166 - RNA, 148 nt, synthetic construct
  misc_feature 1..148: note = Description of Artificial Sequence: Synthetic polynucleotide
  source 1..148: mol_type = other RNA
gtttggtgactgccacgcccagttttagagctagaaatagcaagttaaaataaggctagtccgttatcaacttgaaaaagtggcaccgagtcggtgcggggactgcggaggccagcagtgaacaccccttgggcgtggcagttttttt

SEQ ID NO: 4167 - RNA, 148 nt, synthetic construct
  misc_feature 1..148: note = Description of Artificial Sequence: Synthetic polynucleotide
  source 1..148: mol_type = other RNA
gtttggtgactgccacgcccagttttagagctagaaatagcaagttaaaataaggctagtccgttatcaacttgaaaaagtggcaccgagtcggtgcggactgcggaggccagcagtgaacacccgttgggcgtggcagtcttttttt

SEQ ID NO: 4168 - RNA, 148 nt, synthetic construct
  misc_feature 1..148: note = Description of Artificial Sequence: Synthetic polynucleotide
  source 1..148: mol_type = other RNA
tttggtgactgccacgcccagttttagagctagaaatagcaagttaaaataaggctagtccgttatcaacttgaaaaagtggcaccgagtcggtgcgtggtggggactgcggaggccagcagtgaacacccattgggcgtggcagtca

SEQ ID NO: 4169 - RNA, 148 nt, synthetic construct
  misc_feature 1..148: note = Description of Artificial Sequence: Synthetic polynucleotide
  source 1..148: mol_type = other RNA
gtttggtgactgccacgcccagttttagagctagaaatagcaagttaaaataaggctagtccgttatcaacttgaaaaagtggcaccgagtcggtgcactgcggaggccagcagtgaacacccattgggcgtggcagtcacttttttt

SEQ ID NO: 4170 - RNA, 148 nt, synthetic construct
  misc_feature 1..148: note = Description of Artificial Sequence: Synthetic polynucleotide
  source 1..148: mol_type = other RNA
tttggtgactgccacgcccagttttagagctagaaatagcaagttaaaataaggctagtccgttatcaacttgaaaaagtggcaccgagtcggtgcgtggtggggactgcggaggccagcagtgaacacccgttgggcgtggcagtca

SEQ ID NO: 4171 - RNA, 148 nt, synthetic construct
  misc_feature 1..148: note = Description of Artificial Sequence: Synthetic polynucleotide
  source 1..148: mol_type = other RNA
tttggtgactgccacgcccagttttagagctagaaatagcaagttaaaataaggctagtccgttatcaacttgaaaaagtggcaccgagtcggtgctggtggggactgcggaggccagcagtgaacacccattgggcgtggcagtcac

SEQ ID NO: 4172 - RNA, 148 nt, synthetic construct
  misc_feature 1..148: note = Description of Artificial Sequence: Synthetic polynucleotide
  source 1..148: mol_type = other RNA
tttggtgactgccacgcccagttttagagctagaaatagcaagttaaaataaggctagtccgttatcaacttgaaaaagtggcaccgagtcggtgctggtggggactgcggaggccagcagtgaacaccctttgggcgtggcagtcac

SEQ ID NO: 4173 - RNA, 148 nt, synthetic construct
  misc_feature 1..148: note = Description of Artificial Sequence: Synthetic polynucleotide
  source 1..148: mol_type = other RNA
tttggtgactgccacgcccagttttagagctagaaatagcaagttaaaataaggctagtccgttatcaacttgaaaaagtggcaccgagtcggtgcggtggggactgcggaggccagcagtgaacaccccttgggcgtggcagtcacc

SEQ ID NO: 4174 - RNA, 148 nt, synthetic construct
  misc_feature 1..148: note = Description of Artificial Sequence: Synthetic polynucleotide
  source 1..148: mol_type = other RNA
gtttggtgactgccacgcccagttttagagctagaaatagcaagttaaaataaggctagtccgttatcaacttgaaaaagtggcaccgagtcggtgcgtggggactgcggaggccagcagtgaacacccgttgggcgtggcttttttt

SEQ ID NO: 4175 - RNA, 148 nt, synthetic construct
  misc_feature 1..148: note = Description of Artificial Sequence: Synthetic polynucleotide
  source 1..148: mol_type = other RNA
tttggtgactgccacgcccagttttagagctagaaatagcaagttaaaataaggctagtccgttatcaacttgaaaaagtggcaccgagtcggtgcggtggggactgcggaggccagcagtgaacacccgttgggcgtggcagtcacc

SEQ ID NO: 4176 - RNA, 148 nt, synthetic construct
  misc_feature 1..148: note = Description of Artificial Sequence: Synthetic polynucleotide
  source 1..148: mol_type = other RNA
gtttggtgactgccacgcccagttttagagctagaaatagcaagttaaaataaggctagtccgttatcaacttgaaaaagtggcaccgagtcggtgcgggactgcggaggccagcagtgaacaccccttgggcgtggcagtttttttt

SEQ ID NO: 4177 - RNA, 148 nt, synthetic construct
  misc_feature 1..148: note = Description of Artificial Sequence: Synthetic polynucleotide
  source 1..148: mol_type = other RNA
gtttggtgactgccacgcccagttttagagctagaaatagcaagttaaaataaggctagtccgttatcaacttgaaaaagtggcaccgagtcggtgcggggactgcggaggccagcagtgaacacccgttgggcgtggcagttttttt

SEQ ID NO: 4178 - RNA, 148 nt, synthetic construct
  misc_feature 1..148: note = Description of Artificial Sequence: Synthetic polynucleotide
  source 1..148: mol_type = other RNA
gtttggtgactgccacgcccagttttagagctagaaatagcaagttaaaataaggctagtccgttatcaacttgaaaaagtggcaccgagtcggtgctggggactgcggaggccagcagtgaacaccccttgggcgtggcattttttt

SEQ ID NO: 4179 - RNA, 148 nt, synthetic construct
  misc_feature 1..148: note = Description of Artificial Sequence: Synthetic polynucleotide
  source 1..148: mol_type = other RNA
gtttggtgactgccacgcccagttttagagctagaaatagcaagttaaaataaggctagtccgttatcaacttgaaaaagtggcaccgagtcggtgctggggactgcggaggccagcagtgaacacccgttgggcgtggcattttttt

SEQ ID NO: 4180 - RNA, 148 nt, synthetic construct
  misc_feature 1..148: note = Description of Artificial Sequence: Synthetic polynucleotide
  source 1..148: mol_type = other RNA
gtttggtgactgccacgcccagttttagagctagaaatagcaagttaaaataaggctagtccgttatcaacttgaaaaagtggcaccgagtcggtgctggggactgcggaggccagcagtgaacacccattgggcgtggcattttttt

SEQ ID NO: 4181 - RNA, 148 nt, synthetic construct
  misc_feature 1..148: note = Description of Artificial Sequence: Synthetic polynucleotide
  source 1..148: mol_type = other RNA
gtttggtgactgccacgcccagttttagagctagaaatagcaagttaaaataaggctagtccgttatcaacttgaaaaagtggcaccgagtcggtgcgactgcggaggccagcagtgaacaccccttgggcgtggcagtcattttttt

SEQ ID NO: 4182 - RNA, 148 nt, synthetic construct
  misc_feature 1..148: note = Description of Artificial Sequence: Synthetic polynucleotide
  source 1..148: mol_type = other RNA
tttggtgactgccacgcccagttttagagctagaaatagcaagttaaaataaggctagtccgttatcaacttgaaaaagtggcaccgagtcggtgctggtggggactgcggaggccagcagtgaacacccgttgggcgtggcagtcac

SEQ ID NO: 4183 - RNA, 148 nt, synthetic construct
  misc_feature 1..148: note = Description of Artificial Sequence: Synthetic polynucleotide
  source 1..148: mol_type = other RNA
tttggtgactgccacgcccagttttagagctagaaatagcaagttaaaataaggctagtccgttatcaacttgaaaaagtggcaccgagtcggtgctggtggggactgcggaggccagcagtgaacaccccttgggcgtggcagtcac

SEQ ID NO: 4184 - RNA, 148 nt, synthetic construct
  misc_feature 1..148: note = Description of Artificial Sequence: Synthetic polynucleotide
  source 1..148: mol_type = other RNA
gtttggtgactgccacgcccagttttagagctagaaatagcaagttaaaataaggctagtccgttatcaacttgaaaaagtggcaccgagtcggtgcgactgcggaggccagcagtgaacacccattgggcgtggcagtcattttttt

SEQ ID NO: 4185 - RNA, 148 nt, synthetic construct
  misc_feature 1..148: note = Description of Artificial Sequence: Synthetic polynucleotide
  source 1..148: mol_type = other RNA
gtttggtgactgccacgcccagttttagagctagaaatagcaagttaaaataaggctagtccgttatcaacttgaaaaagtggcaccgagtcggtgcgggactgcggaggccagcagtgaacaccctttgggcgtggcagtttttttt

SEQ ID NO: 4186 - RNA, 148 nt, synthetic construct
  misc_feature 1..148: note = Description of Artificial Sequence: Synthetic polynucleotide
  source 1..148: mol_type = other RNA
tttggtgactgccacgcccagttttagagctagaaatagcaagttaaaataaggctagtccgttatcaacttgaaaaagtggcaccgagtcggtgcgtggtggggactgcggaggccagcagtgaacaccctttgggcgtggcagtca

SEQ ID NO: 4187 - RNA, 148 nt, synthetic construct
  misc_feature 1..148: note = Description of Artificial Sequence: Synthetic polynucleotide
  source 1..148: mol_type = other RNA
gtttggtgactgccacgcccagttttagagctagaaatagcaagttaaaataaggctagtccgttatcaacttgaaaaagtggcaccgagtcggtgcgtggggactgcggaggccagcagtgaacacccattgggcgtggcttttttt

SEQ ID NO: 4188 - RNA, 148 nt, synthetic construct
  misc_feature 1..148: note = Description of Artificial Sequence: Synthetic polynucleotide
  source 1..148: mol_type = other RNA
tttggtgactgccacgcccagttttagagctagaaatagcaagttaaaataaggctagtccgttatcaacttgaaaaagtggcaccgagtcggtgcggtggggactgcggaggccagcagtgaacaccctttgggcgtggcagtcacc

SEQ ID NO: 4189 - RNA, 148 nt, synthetic construct
  misc_feature 1..148: note = Description of Artificial Sequence: Synthetic polynucleotide
  source 1..148: mol_type = other RNA
gtttggtgactgccacgcccagttttagagctagaaatagcaagttaaaataaggctagtccgttatcaacttgaaaaagtggcaccgagtcggtgcactgcggaggccagcagtgaacaccccttgggcgtggcagtcacttttttt

SEQ ID NO: 4190 - RNA, 149 nt, synthetic construct
  misc_feature 1..149: note = Description of Artificial Sequence: Synthetic polynucleotide
  source 1..149: mol_type = other RNA
gtttggtgactgccacgcccagttttagagctagaaatagcaagttaaaataaggctagtccgttatcaacttgaaaaagtggcaccgagtcggtgcgactgcggaggccagcagtgaacaccccttgggcgtggcagtcacttttttt

SEQ ID NO: 4191 - RNA, 149 nt, synthetic construct
  misc_feature 1..149: note = Description of Artificial Sequence: Synthetic polynucleotide
  source 1..149: mol_type = other RNA
gtttggtgactgccacgcccagttttagagctagaaatagcaagttaaaataaggctagtccgttatcaacttgaaaaagtggcaccgagtcggtgcactgcggaggccagcagtgaacacccattgggcgtggcagtcaccttttttt

SEQ ID NO: 4192 - RNA, 149 nt, synthetic construct
  misc_feature 1..149: note = Description of Artificial Sequence: Synthetic polynucleotide
  source 1..149: mol_type = other RNA
tttggtgactgccacgcccagttttagagctagaaatagcaagttaaaataaggctagtccgttatcaacttgaaaaagtggcaccgagtcggtgcgtggtggggactgcggaggccagcagtgaacaccctttgggcgtggcagtcac

SEQ ID NO: 4193 - RNA, 149 nt, synthetic construct
  misc_feature 1..149: note = Description of Artificial Sequence: Synthetic polynucleotide
  source 1..149: mol_type = other RNA
gtttggtgactgccacgcccagttttagagctagaaatagcaagttaaaataaggctagtccgttatcaacttgaaaaagtggcaccgagtcggtgcggtggggactgcggaggccagcagtgaacaccccttgggcgtggcttttttt

SEQ ID NO: 4194 - RNA, 149 nt, synthetic construct
  misc_feature 1..149: note = Description of Artificial Sequence: Synthetic polynucleotide
  source 1..149: mol_type = other RNA
tttggtgactgccacgcccagttttagagctagaaatagcaagttaaaataaggctagtccgttatcaacttgaaaaagtggcaccgagtcggtgcgtggtggggactgcggaggccagcagtgaacacccattgggcgtggcagtcac

SEQ ID NO: 4195 - RNA, 149 nt, synthetic construct
  misc_feature 1..149: note = Description of Artificial Sequence: Synthetic polynucleotide
  source 1..149: mol_type = other RNA
gtttggtgactgccacgcccagttttagagctagaaatagcaagttaaaataaggctagtccgttatcaacttgaaaaagtggcaccgagtcggtgcgtggggactgcggaggccagcagtgaacacccattgggcgtggcattttttt

SEQ ID NO: 4196 - RNA, 149 nt, synthetic construct
  misc_feature 1..149: note = Description of Artificial Sequence: Synthetic polynucleotide
  source 1..149: mol_type = other RNA
gtttggtgactgccacgcccagttttagagctagaaatagcaagttaaaataaggctagtccgttatcaacttgaaaaagtggcaccgagtcggtgcggggactgcggaggccagcagtgaacacccgttgggcgtggcagtttttttt

SEQ ID NO: 4197 - RNA, 149 nt, synthetic construct
  misc_feature 1..149: note = Description of Artificial Sequence: Synthetic polynucleotide
  source 1..149: mol_type = other RNA
gtttggtgactgccacgcccagttttagagctagaaatagcaagttaaaataaggctagtccgttatcaacttgaaaaagtggcaccgagtcggtgcactgcggaggccagcagtgaacacccgttgggcgtggcagtcaccttttttt

SEQ ID NO: 4198 - RNA, 149 nt, synthetic construct
  misc_feature 1..149: note = Description of Artificial Sequence: Synthetic polynucleotide
  source 1..149: mol_type = other RNA
gtttggtgactgccacgcccagttttagagctagaaatagcaagttaaaataaggctagtccgttatcaacttgaaaaagtggcaccgagtcggtgcggactgcggaggccagcagtgaacacccattgggcgtggcagtcattttttt

SEQ ID NO: 4199 - RNA, 149 nt, synthetic construct
  misc_feature 1..149: note = Description of Artificial Sequence: Synthetic polynucleotide
  source 1..149: mol_type = other RNA
tttggtgactgccacgcccagttttagagctagaaatagcaagttaaaataaggctagtccgttatcaacttgaaaaagtggcaccgagtcggtgctggtggggactgcggaggccagcagtgaacacccgttgggcgtggcagtcacc

SEQ ID NO: 4200 - RNA, 149 nt, synthetic construct
  misc_feature 1..149: note = Description of Artificial Sequence: Synthetic polynucleotide
  source 1..149: mol_type = other RNA
gtttggtgactgccacgcccagttttagagctagaaatagcaagttaaaataaggctagtccgttatcaacttgaaaaagtggcaccgagtcggtgcgggactgcggaggccagcagtgaacacccgttgggcgtggcagtcttttttt

SEQ ID NO: 4201 - RNA, 149 nt, synthetic construct
  misc_feature 1..149: note = Description of Artificial Sequence: Synthetic polynucleotide
  source 1..149: mol_type = other RNA
gtttggtgactgccacgcccagttttagagctagaaatagcaagttaaaataaggctagtccgttatcaacttgaaaaagtggcaccgagtcggtgcgactgcggaggccagcagtgaacaccctttgggcgtggcagtcacttttttt

SEQ ID NO: 4202 - RNA, 149 nt, synthetic construct
  misc_feature 1..149: note = Description of Artificial Sequence: Synthetic polynucleotide
  source 1..149: mol_type = other RNA
gtttggtgactgccacgcccagttttagagctagaaatagcaagttaaaataaggctagtccgttatcaacttgaaaaagtggcaccgagtcggtgcgtggggactgcggaggccagcagtgaacaccccttgggcgtggcattttttt

SEQ ID NO: 4203 - RNA, 149 nt, synthetic construct
  misc_feature 1..149: note = Description of Artificial Sequence: Synthetic polynucleotide
  source 1..149: mol_type = other RNA
gtttggtgactgccacgcccagttttagagctagaaatagcaagttaaaataaggctagtccgttatcaacttgaaaaagtggcaccgagtcggtgctggggactgcggaggccagcagtgaacaccccttgggcgtggcagttttttt

SEQ ID NO: 4204 - RNA, 149 nt, synthetic construct
  misc_feature 1..149: note = Description of Artificial Sequence: Synthetic polynucleotide
  source 1..149: mol_type = other RNA
gtttggtgactgccacgcccagttttagagctagaaatagcaagttaaaataaggctagtccgttatcaacttgaaaaagtggcaccgagtcggtgcgactgcggaggccagcagtgaacacccgttgggcgtggcagtcacttttttt

SEQ ID NO: 4205 - RNA, 149 nt, synthetic construct
  misc_feature 1..149: note = Description of Artificial Sequence: Synthetic polynucleotide
  source 1..149: mol_type = other RNA
gtttggtgactgccacgcccagttttagagctagaaatagcaagttaaaataaggctagtccgttatcaacttgaaaaagtggcaccgagtcggtgcggtggggactgcggaggccagcagtgaacaccctttgggcgtggcttttttt

SEQ ID NO: 4206 - RNA, 149 nt, synthetic construct
  misc_feature 1..149: note = Description of Artificial Sequence: Synthetic polynucleotide
  source 1..149: mol_type = other RNA
gtttggtgactgccacgcccagttttagagctagaaatagcaagttaaaataaggctagtccgttatcaacttgaaaaagtggcaccgagtcggtgcactgcggaggccagcagtgaacaccccttgggcgtggcagtcaccttttttt

SEQ ID NO: 4207 - RNA, 149 nt, synthetic construct
  misc_feature 1..149: note = Description of Artificial Sequence: Synthetic polynucleotide
  source 1..149: mol_type = other RNA
gtttggtgactgccacgcccagttttagagctagaaatagcaagttaaaataaggctagtccgttatcaacttgaaaaagtggcaccgagtcggtgctggggactgcggaggccagcagtgaacacccgttgggcgtggcagttttttt

SEQ ID NO: 4208 - RNA, 149 nt, synthetic construct
  misc_feature 1..149: note = Description of Artificial Sequence: Synthetic polynucleotide
  source 1..149: mol_type = other RNA
tttggtgactgccacgcccagttttagagctagaaatagcaagttaaaataaggctagtccgttatcaacttgaaaaagtggcaccgagtcggtgctggtggggactgcggaggccagcagtgaacacccattgggcgtggcagtcacc

SEQ ID NO: 4209 - RNA, 149 nt, synthetic construct
  misc_feature 1..149: note = Description of Artificial Sequence: Synthetic polynucleotide
  source 1..149: mol_type = other RNA
gtttggtgactgccacgcccagttttagagctagaaatagcaagttaaaataaggctagtccgttatcaacttgaaaaagtggcaccgagtcggtgcactgcggaggccagcagtgaacaccctttgggcgtggcagtcaccttttttt

SEQ ID NO: 4210 - RNA, 149 nt, synthetic construct
  misc_feature 1..149: note = Description of Artificial Sequence: Synthetic polynucleotide
  source 1..149: mol_type = other RNA
gtttggtgactgccacgcccagttttagagctagaaatagcaagttaaaataaggctagtccgttatcaacttgaaaaagtggcaccgagtcggtgcggggactgcggaggccagcagtgaacaccccttgggcgtggcagtttttttt

SEQ ID NO: 4211 - RNA, 149 nt, synthetic construct
  misc_feature 1..149: note = Description of Artificial Sequence: Synthetic polynucleotide
  source 1..149: mol_type = other RNA
gtttggtgactgccacgcccagttttagagctagaaatagcaagttaaaataaggctagtccgttatcaacttgaaaaagtggcaccgagtcggtgcgactgcggaggccagcagtgaacacccattgggcgtggcagtcacttttttt

SEQ ID NO: 4212 - RNA, 149 nt, synthetic construct
  misc_feature 1..149: note = Description of Artificial Sequence: Synthetic polynucleotide
  source 1..149: mol_type = other RNA
gtttggtgactgccacgcccagttttagagctagaaatagcaagttaaaataaggctagtccgttatcaacttgaaaaagtggcaccgagtcggtgcggggactgcggaggccagcagtgaacaccctttgggcgtggcagtttttttt

SEQ ID NO: 4213 - RNA, 149 nt, synthetic construct
  misc_feature 1..149: note = Description of Artificial Sequence: Synthetic polynucleotide
  source 1..149: mol_type = other RNA
gtttggtgactgccacgcccagttttagagctagaaatagcaagttaaaataaggctagtccgttatcaacttgaaaaagtggcaccgagtcggtgcggtggggactgcggaggccagcagtgaacacccattgggcgtggcttttttt

SEQ ID NO: 4214 - RNA, 149 nt, synthetic construct
  misc_feature 1..149: note = Description of Artificial Sequence: Synthetic polynucleotide
  source 1..149: mol_type = other RNA
gtttggtgactgccacgcccagttttagagctagaaatagcaagttaaaataaggctagtccgttatcaacttgaaaaagtggcaccgagtcggtgcggactgcggaggccagcagtgaacacccgttgggcgtggcagtcattttttt

SEQ ID NO: 4215 - RNA, 149 nt, synthetic construct
  misc_feature 1..149: note = Description of Artificial Sequence: Synthetic polynucleotide
  source 1..149: mol_type = other RNA
gtttggtgactgccacgcccagttttagagctagaaatagcaagttaaaataaggctagtccgttatcaacttgaaaaagtggcaccgagtcggtgcggggactgcggaggccagcagtgaacacccattgggcgtggcagtttttttt

SEQ ID NO: 4216 - RNA, 149 nt, synthetic construct
  misc_feature 1..149: note = Description of Artificial Sequence: Synthetic polynucleotide
  source 1..149: mol_type = other RNA
gtttggtgactgccacgcccagttttagagctagaaatagcaagttaaaataaggctagtccgttatcaacttgaaaaagtggcaccgagtcggtgcggactgcggaggccagcagtgaacaccccttgggcgtggcagtcattttttt

SEQ ID NO: 4217 - RNA, 149 nt, synthetic construct
  misc_feature 1..149: note = Description of Artificial Sequence: Synthetic polynucleotide
  source 1..149: mol_type = other RNA
gtttggtgactgccacgcccagttttagagctagaaatagcaagttaaaataaggctagtccgttatcaacttgaaaaagtggcaccgagtcggtgcgtggggactgcggaggccagcagtgaacacccgttgggcgtggcattttttt

SEQ ID NO: 4218 - RNA, 149 nt, synthetic construct
  misc_feature 1..149: note = Description of Artificial Sequence: Synthetic polynucleotide
  source 1..149: mol_type = other RNA
gtttggtgactgccacgcccagttttagagctagaaatagcaagttaaaataaggctagtccgttatcaacttgaaaaagtggcaccgagtcggtgctggggactgcggaggccagcagtgaacacccattgggcgtggcagttttttt

SEQ ID NO: 4219 - RNA, 149 nt, synthetic construct
  misc_feature 1..149: note = Description of Artificial Sequence: Synthetic polynucleotide
  source 1..149: mol_type = other RNA
gtttggtgactgccacgcccagttttagagctagaaatagcaagttaaaataaggctagtccgttatcaacttgaaaaagtggcaccgagtcggtgcgtggggactgcggaggccagcagtgaacaccctttgggcgtggcattttttt

SEQ ID NO: 4220 - RNA, 149 nt, synthetic construct
  misc_feature 1..149: note = Description of Artificial Sequence: Synthetic polynucleotide
  source 1..149: mol_type = other RNA
gtttggtgactgccacgcccagttttagagctagaaatagcaagttaaaataaggctagtccgttatcaacttgaaaaagtggcaccgagtcggtgcggactgcggaggccagcagtgaacaccctttgggcgtggcagtcattttttt

SEQ ID NO: 4221 - RNA, 149 nt, synthetic construct
  misc_feature 1..149: note = Description of Artificial Sequence: Synthetic polynucleotide
  source 1..149: mol_type = other RNA
gtttggtgactgccacgcccagttttagagctagaaatagcaagttaaaataaggctagtccgttatcaacttgaaaaagtggcaccgagtcggtgcggtggggactgcggaggccagcagtgaacacccgttgggcgtggcttttttt

SEQ ID NO: 4222 - RNA, 149 nt, synthetic construct
  misc_feature 1..149: note = Description of Artificial Sequence: Synthetic polynucleotide
  source 1..149: mol_type = other RNA
gtttggtgactgccacgcccagttttagagctagaaatagcaagttaaaataaggctagtccgttatcaacttgaaaaagtggcaccgagtcggtgcgggactgcggaggccagcagtgaacaccccttgggcgtggcagtcttttttt

SEQ ID NO: 4223 - RNA, 149 nt, synthetic construct
  misc_feature 1..149: note = Description of Artificial Sequence: Synthetic polynucleotide
  source 1..149: mol_type = other RNA
gtttggtgactgccacgcccagttttagagctagaaatagcaagttaaaataaggctagtccgttatcaacttgaaaaagtggcaccgagtcggtgcgggactgcggaggccagcagtgaacacccattgggcgtggcagtcttttttt

SEQ ID NO: 4224 - RNA, 149 nt, synthetic construct
  misc_feature 1..149: note = Description of Artificial Sequence: Synthetic polynucleotide
  source 1..149: mol_type = other RNA
gtttggtgactgccacgcccagttttagagctagaaatagcaagttaaaataaggctagtccgttatcaacttgaaaaagtggcaccgagtcggtgctggggactgcggaggccagcagtgaacaccctttgggcgtggcagttttttt

SEQ ID NO: 4225 - RNA, 149 nt, synthetic construct
  misc_feature 1..149: note = Description of Artificial Sequence: Synthetic polynucleotide
  source 1..149: mol_type = other RNA
tttggtgactgccacgcccagttttagagctagaaatagcaagttaaaataaggctagtccgttatcaacttgaaaaagtggcaccgagtcggtgcgtggtggggactgcggaggccagcagtgaacacccgttgggcgtggcagtcac

SEQ ID NO: 4226 - RNA, 149 nt, synthetic construct
  misc_feature 1..149: note = Description of Artificial Sequence: Synthetic polynucleotide
  source 1..149: mol_type = other RNA
tttggtgactgccacgcccagttttagagctagaaatagcaagttaaaataaggctagtccgttatcaacttgaaaaagtggcaccgagtcggtgctggtggggactgcggaggccagcagtgaacaccccttgggcgtggcagtcacc

SEQ ID NO: 4227 - RNA, 149 nt, synthetic construct
  misc_feature 1..149: note = Description of Artificial Sequence: Synthetic polynucleotide
  source 1..149: mol_type = other RNA
tttggtgactgccacgcccagttttagagctagaaatagcaagttaaaataaggctagtccgttatcaacttgaaaaagtggcaccgagtcggtgcgtggtggggactgcggaggccagcagtgaacaccccttgggcgtggcagtcac

SEQ ID NO: 4228 - RNA, 149 nt, synthetic construct
  misc_feature 1..149: note = Description of Artificial Sequence: Synthetic polynucleotide
  source 1..149: mol_type = other RNA
tttggtgactgccacgcccagttttagagctagaaatagcaagttaaaataaggctagtccgttatcaacttgaaaaagtggcaccgagtcggtgctggtggggactgcggaggccagcagtgaacaccctttgggcgtggcagtcacc

SEQ ID NO: 4229 - RNA, 149 nt, synthetic construct
  misc_feature 1..149: note = Description of Artificial Sequence: Synthetic polynucleotide
  source 1..149: mol_type = other RNA
gtttggtgactgccacgcccagttttagagctagaaatagcaagttaaaataaggctagtccgttatcaacttgaaaaagtggcaccgagtcggtgcgggactgcggaggccagcagtgaacaccctttgggcgtggcagtcttttttt

SEQ ID NO: 4230 - RNA, 150 nt, synthetic construct
  misc_feature 1..150: note = Description of Artificial Sequence: Synthetic polynucleotide
  source 1..150: mol_type = other RNA
gtttggtgactgccacgcccagttttagagctagaaatagcaagttaaaataaggctagtccgttatcaacttgaaaaagtggcaccgagtcggtgcgtggggactgcggaggccagcagtgaacaccctttgggcgtggcagttttttt

SEQ ID NO: 4231 - RNA, 150 nt, synthetic construct
  misc_feature 1..150: note = Description of Artificial Sequence: Synthetic polynucleotide
  source 1..150: mol_type = other RNA
gtttggtgactgccacgcccagttttagagctagaaatagcaagttaaaataaggctagtccgttatcaacttgaaaaagtggcaccgagtcggtgcggggactgcggaggccagcagtgaacacccgttgggcgtggcagtcttttttt

SEQ ID NO: 4232 - RNA, 150 nt, synthetic construct
  misc_feature 1..150: note = Description of Artificial Sequence: Synthetic polynucleotide
  source 1..150: mol_type = other RNA
tttggtgactgccacgcccagttttagagctagaaatagcaagttaaaataaggctagtccgttatcaacttgaaaaagtggcaccgagtcggtgcgtggtggggactgcggaggccagcagtgaacacccgttgggcgtggcagtcacc

SEQ ID NO: 4233 - RNA, 150 nt, synthetic construct
  misc_feature 1..150: note = Description of Artificial Sequence: Synthetic polynucleotide
  source 1..150: mol_type = other RNA
gtttggtgactgccacgcccagttttagagctagaaatagcaagttaaaataaggctagtccgttatcaacttgaaaaagtggcaccgagtcggtgcggggactgcggaggccagcagtgaacaccccttgggcgtggcagtcttttttt

SEQ ID NO: 4234 - RNA, 150 nt, synthetic construct
  misc_feature 1..150: note = Description of Artificial Sequence: Synthetic polynucleotide
  source 1..150: mol_type = other RNA
gtttggtgactgccacgcccagttttagagctagaaatagcaagttaaaataaggctagtccgttatcaacttgaaaaagtggcaccgagtcggtgcggactgcggaggccagcagtgaacacccattgggcgtggcagtcacttttttt

SEQ ID NO: 4235 - RNA, 150 nt, synthetic construct
  misc_feature 1..150: note = Description of Artificial Sequence: Synthetic polynucleotide
  source 1..150: mol_type = other RNA
gtttggtgactgccacgcccagttttagagctagaaatagcaagttaaaataaggctagtccgttatcaacttgaaaaagtggcaccgagtcggtgcgggactgcggaggccagcagtgaacacccattgggcgtggcagtcattttttt

SEQ ID NO: 4236 - RNA, 150 nt, synthetic construct
  misc_feature 1..150: note = Description of Artificial Sequence: Synthetic polynucleotide
  source 1..150: mol_type = other RNA
gtttggtgactgccacgcccagttttagagctagaaatagcaagttaaaataaggctagtccgttatcaacttgaaaaagtggcaccgagtcggtgcgactgcggaggccagcagtgaacacccattgggcgtggcagtcaccttttttt

SEQ ID NO: 4237 - RNA, 150 nt, synthetic construct
  misc_feature 1..150: note = Description of Artificial Sequence: Synthetic polynucleotide
  source 1..150: mol_type = other RNA
gtttggtgactgccacgcccagttttagagctagaaatagcaagttaaaataaggctagtccgttatcaacttgaaaaagtggcaccgagtcggtgctggtggggactgcggaggccagcagtgaacacccattgggcgtggcttttttt

SEQ ID NO: 4238 - RNA, 150 nt, synthetic construct
  misc_feature 1..150: note = Description of Artificial Sequence: Synthetic polynucleotide
  source 1..150: mol_type = other RNA
gtttggtgactgccacgcccagttttagagctagaaatagcaagttaaaataaggctagtccgttatcaacttgaaaaagtggcaccgagtcggtgcgggactgcggaggccagcagtgaacaccccttgggcgtggcagtcattttttt

SEQ ID NO: 4239 - RNA, 150 nt, synthetic construct
  misc_feature 1..150: note = Description of Artificial Sequence: Synthetic polynucleotide
  source 1..150: mol_type = other RNA
tttggtgactgccacgcccagttttagagctagaaatagcaagttaaaataaggctagtccgttatcaacttgaaaaagtggcaccgagtcggtgcgtggtggggactgcggaggccagcagtgaacacccattgggcgtggcagtcacc

SEQ ID NO: 4240 - RNA, 150 nt, synthetic construct
  misc_feature 1..150: note = Description of Artificial Sequence: Synthetic polynucleotide
  source 1..150: mol_type = other RNA
tttggtgactgccacgcccagttttagagctagaaatagcaagttaaaataaggctagtccgttatcaacttgaaaaagtggcaccgagtcggtgcgtggtggggactgcggaggccagcagtgaacaccctttgggcgtggcagtcacc

SEQ ID NO: 4241 - RNA, 150 nt, synthetic construct
  misc_feature 1..150: note = Description of Artificial Sequence: Synthetic polynucleotide
  source 1..150: mol_type = other RNA
gtttggtgactgccacgcccagttttagagctagaaatagcaagttaaaataaggctagtccgttatcaacttgaaaaagtggcaccgagtcggtgcggactgcggaggccagcagtgaacaccccttgggcgtggcagtcacttttttt

SEQ ID NO: 4242 - RNA, 150 nt, synthetic construct
  misc_feature 1..150: note = Description of Artificial Sequence: Synthetic polynucleotide
  source 1..150: mol_type = other RNA
gtttggtgactgccacgcccagttttagagctagaaatagcaagttaaaataaggctagtccgttatcaacttgaaaaagtggcaccgagtcggtgctggggactgcggaggccagcagtgaacacccgttgggcgtggcagtttttttt

SEQ ID NO: 4243 - RNA, 150 nt, synthetic construct
  misc_feature 1..150: note = Description of Artificial Sequence: Synthetic polynucleotide
  source 1..150: mol_type = other RNA
gtttggtgactgccacgcccagttttagagctagaaatagcaagttaaaataaggctagtccgttatcaacttgaaaaagtggcaccgagtcggtgcggggactgcggaggccagcagtgaacacccattgggcgtggcagtcttttttt

SEQ ID NO: 4244 - RNA, 150 nt, synthetic construct
  misc_feature 1..150: note = Description of Artificial Sequence: Synthetic polynucleotide
  source 1..150: mol_type = other RNA
gtttggtgactgccacgcccagttttagagctagaaatagcaagttaaaataaggctagtccgttatcaacttgaaaaagtggcaccgagtcggtgcgtggggactgcggaggccagcagtgaacacccgttgggcgtggcagttttttt

SEQ ID NO: 4245 - RNA, 150 nt, synthetic construct
  misc_feature 1..150: note = Description of Artificial Sequence: Synthetic polynucleotide
  source 1..150: mol_type = other RNA
gtttggtgactgccacgcccagttttagagctagaaatagcaagttaaaataaggctagtccgttatcaacttgaaaaagtggcaccgagtcggtgcgggactgcggaggccagcagtgaacaccctttgggcgtggcagtcattttttt

SEQ ID NO: 4246 - RNA, 150 nt, synthetic construct
  misc_feature 1..150: note = Description of Artificial Sequence: Synthetic polynucleotide
  source 1..150: mol_type = other RNA
gtttggtgactgccacgcccagttttagagctagaaatagcaagttaaaataaggctagtccgttatcaacttgaaaaagtggcaccgagtcggtgcgggactgcggaggccagcagtgaacacccgttgggcgtggcagtcattttttt

SEQ ID NO: 4247 - RNA, 150 nt, synthetic construct
  misc_feature 1..150: note = Description of Artificial Sequence: Synthetic polynucleotide
  source 1..150: mol_type = other RNA
gtttggtgactgccacgcccagttttagagctagaaatagcaagttaaaataaggctagtccgttatcaacttgaaaaagtggcaccgagtcggtgctggtggggactgcggaggccagcagtgaacacccgttgggcgtggcttttttt

SEQ ID NO: 4248 - RNA, 150 nt, synthetic construct
  misc_feature 1..150: note = Description of Artificial Sequence: Synthetic polynucleotide
  source 1..150: mol_type = other RNA
gtttggtgactgccacgcccagttttagagctagaaatagcaagttaaaataaggctagtccgttatcaacttgaaaaagtggcaccgagtcggtgctggtggggactgcggaggccagcagtgaacaccctttgggcgtggcttttttt

SEQ ID NO: 4249 - RNA, 150 nt, synthetic construct
  misc_feature 1..150: note = Description of Artificial Sequence: Synthetic polynucleotide
  source 1..150: mol_type = other RNA
gtttggtgactgccacgcccagttttagagctagaaatagcaagttaaaataaggctagtccgttatcaacttgaaaaagtggcaccgagtcggtgcgtggggactgcggaggccagcagtgaacaccccttgggcgtggcagttttttt

SEQ ID NO: 4250 - RNA, 150 nt, synthetic construct
  misc_feature 1..150: note = Description of Artificial Sequence: Synthetic polynucleotide
  source 1..150: mol_type = other RNA
gtttggtgactgccacgcccagttttagagctagaaatagcaagttaaaataaggctagtccgttatcaacttgaaaaagtggcaccgagtcggtgcgtggggactgcggaggccagcagtgaacacccattgggcgtggcagttttttt

SEQ ID NO: 4251 - RNA, 150 nt, synthetic construct
  misc_feature 1..150: note = Description of Artificial Sequence: Synthetic polynucleotide
  source 1..150: mol_type = other RNA
gtttggtgactgccacgcccagttttagagctagaaatagcaagttaaaataaggctagtccgttatcaacttgaaaaagtggcaccgagtcggtgctggtggggactgcggaggccagcagtgaacaccccttgggcgtggcttttttt

SEQ ID NO: 4252 - RNA, 150 nt, synthetic construct
  misc_feature 1..150: note = Description of Artificial Sequence: Synthetic polynucleotide
  source 1..150: mol_type = other RNA
gtttggtgactgccacgcccagttttagagctagaaatagcaagttaaaataaggctagtccgttatcaacttgaaaaagtggcaccgagtcggtgcgactgcggaggccagcagtgaacacccgttgggcgtggcagtcaccttttttt

SEQ ID NO: 4253 - RNA, 150 nt, synthetic construct
  misc_feature 1..150: note = Description of Artificial Sequence: Synthetic polynucleotide
  source 1..150: mol_type = other RNA
gtttggtgactgccacgcccagttttagagctagaaatagcaagttaaaataaggctagtccgttatcaacttgaaaaagtggcaccgagtcggtgcggtggggactgcggaggccagcagtgaacacccattgggcgtggcattttttt

SEQ ID NO: 4254 - RNA, 150 nt, synthetic construct
  misc_feature 1..150: note = Description of Artificial Sequence: Synthetic polynucleotide
  source 1..150: mol_type = other RNA
gtttggtgactgccacgcccagttttagagctagaaatagcaagttaaaataaggctagtccgttatcaacttgaaaaagtggcaccgagtcggtgcggtggggactgcggaggccagcagtgaacaccctttgggcgtggcattttttt

SEQ ID NO: 4255 - RNA, 150 nt, synthetic construct
  misc_feature 1..150: note = Description of Artificial Sequence: Synthetic polynucleotide
  source 1..150: mol_type = other RNA
gtttggtgactgccacgcccagttttagagctagaaatagcaagttaaaataaggctagtccgttatcaacttgaaaaagtggcaccgagtcggtgcggtggggactgcggaggccagcagtgaacacccgttgggcgtggcattttttt

SEQ ID NO: 4256 - RNA, 150 nt, synthetic construct
  misc_feature 1..150: note = Description of Artificial Sequence: Synthetic polynucleotide
  source 1..150: mol_type = other RNA
gtttggtgactgccacgcccagttttagagctagaaatagcaagttaaaataaggctagtccgttatcaacttgaaaaagtggcaccgagtcggtgcgactgcggaggccagcagtgaacaccccttgggcgtggcagtcaccttttttt

SEQ ID NO: 4257 - RNA, 150 nt, synthetic construct
  misc_feature 1..150: note = Description of Artificial Sequence: Synthetic polynucleotide
  source 1..150: mol_type = other RNA
gtttggtgactgccacgcccagttttagagctagaaatagcaagttaaaataaggctagtccgttatcaacttgaaaaagtggcaccgagtcggtgcggactgcggaggccagcagtgaacacccgttgggcgtggcagtcacttttttt

SEQ ID NO: 4258 - RNA, 150 nt, synthetic construct
  misc_feature 1..150: note = Description of Artificial Sequence: Synthetic polynucleotide
  source 1..150: mol_type = other RNA
tttggtgactgccacgcccagttttagagctagaaatagcaagttaaaataaggctagtccgttatcaacttgaaaaagtggcaccgagtcggtgcgtggtggggactgcggaggccagcagtgaacaccccttgggcgtggcagtcacc

SEQ ID NO: 4259 - RNA, 150 nt, synthetic construct
  misc_feature 1..150: note = Description of Artificial Sequence: Synthetic polynucleotide
  source 1..150: mol_type = other RNA
gtttggtgactgccacgcccagttttagagctagaaatagcaagttaaaataaggctagtccgttatcaacttgaaaaagtggcaccgagtcggtgcggactgcggaggccagcagtgaacaccctttgggcgtggcagtcacttttttt

SEQ ID NO: 4260 - RNA, 150 nt, synthetic construct
  misc_feature 1..150: note = Description of Artificial Sequence: Synthetic polynucleotide
  source 1..150: mol_type = other RNA
gtttggtgactgccacgcccagttttagagctagaaatagcaagttaaaataaggctagtccgttatcaacttgaaaaagtggcaccgagtcggtgctggggactgcggaggccagcagtgaacaccctttgggcgtggcagtttttttt

SEQ ID NO: 4261 - RNA, 150 nt, synthetic construct
  misc_feature 1..150: note = Description of Artificial Sequence: Synthetic polynucleotide
  source 1..150: mol_type = other RNA
gtttggtgactgccacgcccagttttagagctagaaatagcaagttaaaataaggctagtccgttatcaacttgaaaaagtggcaccgagtcggtgcggggactgcggaggccagcagtgaacaccctttgggcgtggcagtcttttttt

SEQ ID NO: 4262 - RNA, 150 nt, synthetic construct
  misc_feature 1..150: note = Description of Artificial Sequence: Synthetic polynucleotide
  source 1..150: mol_type = other RNA
gtttggtgactgccacgcccagttttagagctagaaatagcaagttaaaataaggctagtccgttatcaacttgaaaaagtggcaccgagtcggtgcggtggggactgcggaggccagcagtgaacaccccttgggcgtggcattttttt

SEQ ID NO: 4263 - RNA, 150 nt, synthetic construct
  misc_feature 1..150: note = Description of Artificial Sequence: Synthetic polynucleotide
  source 1..150: mol_type = other RNA
gtttggtgactgccacgcccagttttagagctagaaatagcaagttaaaataaggctagtccgttatcaacttgaaaaagtggcaccgagtcggtgctggggactgcggaggccagcagtgaacaccccttgggcgtggcagtttttttt

SEQ ID NO: 4264 - RNA, 150 nt, synthetic construct
  misc_feature 1..150: note = Description of Artificial Sequence: Synthetic polynucleotide
  source 1..150: mol_type = other RNA
gtttggtgactgccacgcccagttttagagctagaaatagcaagttaaaataaggctagtccgttatcaacttgaaaaagtggcaccgagtcggtgctggggactgcggaggccagcagtgaacacccattgggcgtggcagtttttttt

SEQ ID NO: 4265 - RNA, 150 nt, synthetic construct
  misc_feature 1..150: note = Description of Artificial Sequence: Synthetic polynucleotide
  source 1..150: mol_type = other RNA
gtttggtgactgccacgcccagttttagagctagaaatagcaagttaaaataaggctagtccgttatcaacttgaaaaagtggcaccgagtcggtgcgactgcggaggccagcagtgaacaccctttgggcgtggcagtcaccttttttt

SEQ ID NO: 4266 - RNA, 151 nt, synthetic construct
  misc_feature 1..151: note = Description of Artificial Sequence: Synthetic polynucleotide
  source 1..151: mol_type = other RNA
gtttggtgactgccacgcccagttttagagctagaaatagcaagttaaaataaggctagtccgttatcaacttgaaaaagtggcaccgagtcggtgctggtggggactgcggaggccagcagtgaacaccctttgggcgtggcattttttt

SEQ ID NO: 4267 - RNA, 151 nt, synthetic construct
  misc_feature 1..151: note = Description of Artificial Sequence: Synthetic polynucleotide
  source 1..151: mol_type = other RNA
gtttggtgactgccacgcccagttttagagctagaaatagcaagttaaaataaggctagtccgttatcaacttgaaaaagtggcaccgagtcggtgcgtggggactgcggaggccagcagtgaacaccccttgggcgtggcagtttttttt

SEQ ID NO: 4268 - RNA, 151 nt, synthetic construct
  misc_feature 1..151: note = Description of Artificial Sequence: Synthetic polynucleotide
  source 1..151: mol_type = other RNA
gtttggtgactgccacgcccagttttagagctagaaatagcaagttaaaataaggctagtccgttatcaacttgaaaaagtggcaccgagtcggtgctggggactgcggaggccagcagtgaacacccattgggcgtggcagtcttttttt

SEQ ID NO: 4269 - RNA, 151 nt, synthetic construct
  misc_feature 1..151: note = Description of Artificial Sequence: Synthetic polynucleotide
  source 1..151: mol_type = other RNA
gtttggtgactgccacgcccagttttagagctagaaatagcaagttaaaataaggctagtccgttatcaacttgaaaaagtggcaccgagtcggtgcgggactgcggaggccagcagtgaacacccattgggcgtggcagtcacttttttt

SEQ ID NO: 4270 - RNA, 151 nt, synthetic construct
  misc_feature 1..151: note = Description of Artificial Sequence: Synthetic polynucleotide
  source 1..151: mol_type = other RNA
gtttggtgactgccacgcccagttttagagctagaaatagcaagttaaaataaggctagtccgttatcaacttgaaaaagtggcaccgagtcggtgcggtggggactgcggaggccagcagtgaacacccgttgggcgtggcagttttttt

SEQ ID NO: 4271 - RNA, 151 nt, synthetic construct
  misc_feature 1..151: note = Description of Artificial Sequence: Synthetic polynucleotide
  source 1..151: mol_type = other RNA
gtttggtgactgccacgcccagttttagagctagaaatagcaagttaaaataaggctagtccgttatcaacttgaaaaagtggcaccgagtcggtgcgtggggactgcggaggccagcagtgaacaccctttgggcgtggcagtttttttt

SEQ ID NO: 4272 - RNA, 151 nt, synthetic construct
  misc_feature 1..151: note = Description of Artificial Sequence: Synthetic polynucleotide
  source 1..151: mol_type = other RNA
gtttggtgactgccacgcccagttttagagctagaaatagcaagttaaaataaggctagtccgttatcaacttgaaaaagtggcaccgagtcggtgctggtggggactgcggaggccagcagtgaacaccccttgggcgtggcattttttt

SEQ ID NO: 4273 - RNA, 151 nt, synthetic construct
  misc_feature 1..151: note = Description of Artificial Sequence: Synthetic polynucleotide
  source 1..151: mol_type = other RNA
gtttggtgactgccacgcccagttttagagctagaaatagcaagttaaaataaggctagtccgttatcaacttgaaaaagtggcaccgagtcggtgctggggactgcggaggccagcagtgaacaccccttgggcgtggcagtcttttttt

SEQ ID NO: 4274 - RNA, 151 nt, synthetic construct
  misc_feature 1..151: note = Description of Artificial Sequence: Synthetic polynucleotide
  source 1..151: mol_type = other RNA
gtttggtgactgccacgcccagttttagagctagaaatagcaagttaaaataaggctagtccgttatcaacttgaaaaagtggcaccgagtcggtgctggggactgcggaggccagcagtgaacaccctttgggcgtggcagtcttttttt

SEQ ID NO: 4275 - RNA, 151 nt, synthetic construct
  misc_feature 1..151: note = Description of Artificial Sequence: Synthetic polynucleotide
  source 1..151: mol_type = other RNA
gtttggtgactgccacgcccagttttagagctagaaatagcaagttaaaataaggctagtccgttatcaacttgaaaaagtggcaccgagtcggtgctggtggggactgcggaggccagcagtgaacacccattgggcgtggcattttttt

SEQ ID NO: 4276 - RNA, 151 nt, synthetic construct
  misc_feature 1..151: note = Description of Artificial Sequence: Synthetic polynucleotide
  source 1..151: mol_type = other RNA
gtttggtgactgccacgcccagttttagagctagaaatagcaagttaaaataaggctagtccgttatcaacttgaaaaagtggcaccgagtcggtgcggggactgcggaggccagcagtgaacacccattgggcgtggcagtcattttttt

SEQ ID NO: 4277 - RNA, 151 nt, synthetic construct
  misc_feature 1..151: note = Description of Artificial Sequence: Synthetic polynucleotide
  source 1..151: mol_type = other RNA
gtttggtgactgccacgcccagttttagagctagaaatagcaagttaaaataaggctagtccgttatcaacttgaaaaagtggcaccgagtcggtgcggactgcggaggccagcagtgaacaccctttgggcgtggcagtcaccttttttt

SEQ ID NO: 4278 - RNA, 151 nt, synthetic construct
  misc_feature 1..151: note = Description of Artificial Sequence: Synthetic polynucleotide
  source 1..151: mol_type = other RNA
gtttggtgactgccacgcccagttttagagctagaaatagcaagttaaaataaggctagtccgttatcaacttgaaaaagtggcaccgagtcggtgctggggactgcggaggccagcagtgaacacccgttgggcgtggcagtcttttttt

SEQ ID NO: 4279 - RNA, 151 nt, synthetic construct
  misc_feature 1..151: note = Description of Artificial Sequence: Synthetic polynucleotide
  source 1..151: mol_type = other RNA
gtttggtgactgccacgcccagttttagagctagaaatagcaagttaaaataaggctagtccgttatcaacttgaaaaagtggcaccgagtcggtgcggggactgcggaggccagcagtgaacaccccttgggcgtggcagtcattttttt

SEQ ID NO: 4280 - RNA, 151 nt, synthetic construct
  misc_feature 1..151: note = Description of Artificial Sequence: Synthetic polynucleotide
  source 1..151: mol_type = other RNA
gtttggtgactgccacgcccagttttagagctagaaatagcaagttaaaataaggctagtccgttatcaacttgaaaaagtggcaccgagtcggtgcgtggggactgcggaggccagcagtgaacacccgttgggcgtggcagtttttttt

SEQ ID NO: 4281 - RNA, 151 nt, synthetic construct
  misc_feature 1..151: note = Description of Artificial Sequence: Synthetic polynucleotide
  source 1..151: mol_type = other RNA
gtttggtgactgccacgcccagttttagagctagaaatagcaagttaaaataaggctagtccgttatcaacttgaaaaagtggcaccgagtcggtgcggactgcggaggccagcagtgaacaccccttgggcgtggcagtcaccttttttt

SEQ ID NO: 4282 - RNA, 151 nt, synthetic construct
  misc_feature 1..151: note = Description of Artificial Sequence: Synthetic polynucleotide
  source 1..151: mol_type = other RNA
gtttggtgactgccacgcccagttttagagctagaaatagcaagttaaaataaggctagtccgttatcaacttgaaaaagtggcaccgagtcggtgctggtggggactgcggaggccagcagtgaacacccgttgggcgtggcattttttt

SEQ ID NO: 4283 - RNA, 151 nt, synthetic construct
  misc_feature 1..151: note = Description of Artificial Sequence: Synthetic polynucleotide
  source 1..151: mol_type = other RNA
gtttggtgactgccacgcccagttttagagctagaaatagcaagttaaaataaggctagtccgttatcaacttgaaaaagtggcaccgagtcggtgcggggactgcggaggccagcagtgaacacccgttgggcgtggcagtcattttttt

SEQ ID NO: 4284 - RNA, 151 nt, synthetic construct
  misc_feature 1..151: note = Description of Artificial Sequence: Synthetic polynucleotide
  source 1..151: mol_type = other RNA
gtttggtgactgccacgcccagttttagagctagaaatagcaagttaaaataaggctagtccgttatcaacttgaaaaagtggcaccgagtcggtgcggactgcggaggccagcagtgaacacccgttgggcgtggcagtcaccttttttt

SEQ ID NO: 4285 - RNA, 151 nt, synthetic construct
  misc_feature 1..151: note = Description of Artificial Sequence: Synthetic polynucleotide
  source 1..151: mol_type = other RNA
gtttggtgactgccacgcccagttttagagctagaaatagcaagttaaaataaggctagtccgttatcaacttgaaaaagtggcaccgagtcggtgcgggactgcggaggccagcagtgaacacccgttgggcgtggcagtcacttttttt

SEQ ID NO: 4286 - RNA, 151 nt, synthetic construct
  misc_feature 1..151: note = Description of Artificial Sequence: Synthetic polynucleotide
  source 1..151: mol_type = other RNA
gtttggtgactgccacgcccagttttagagctagaaatagcaagttaaaataaggctagtccgttatcaacttgaaaaagtggcaccgagtcggtgcgtggggactgcggaggccagcagtgaacacccattgggcgtggcagtttttttt

SEQ ID NO: 4287 - RNA, 151 nt, synthetic construct
  misc_feature 1..151: note = Description of Artificial Sequence: Synthetic polynucleotide
  source 1..151: mol_type = other RNA
gtttggtgactgccacgcccagttttagagctagaaatagcaagttaaaataaggctagtccgttatcaacttgaaaaagtggcaccgagtcggtgcggtggggactgcggaggccagcagtgaacacccattgggcgtggcagttttttt

SEQ ID NO: 4288 - RNA, 151 nt, synthetic construct
  misc_feature 1..151: note = Description of Artificial Sequence: Synthetic polynucleotide
  source 1..151: mol_type = other RNA
gtttggtgactgccacgcccagttttagagctagaaatagcaagttaaaataaggctagtccgttatcaacttgaaaaagtggcaccgagtcggtgcgggactgcggaggccagcagtgaacaccctttgggcgtggcagtcacttttttt

SEQ ID NO: 4289 - RNA, 151 nt, synthetic construct
  misc_feature 1..151: note = Description of Artificial Sequence: Synthetic polynucleotide
  source 1..151: mol_type = other RNA
gtttggtgactgccacgcccagttttagagctagaaatagcaagttaaaataaggctagtccgttatcaacttgaaaaagtggcaccgagtcggtgcggtggggactgcggaggccagcagtgaacaccctttgggcgtggcagttttttt

SEQ ID NO: 4290 - RNA, 151 nt, synthetic construct
  misc_feature 1..151: note = Description of Artificial Sequence: Synthetic polynucleotide
  source 1..151: mol_type = other RNA
gtttggtgactgccacgcccagttttagagctagaaatagcaagttaaaataaggctagtccgttatcaacttgaaaaagtggcaccgagtcggtgcggtggggactgcggaggccagcagtgaacaccccttgggcgtggcagttttttt

SEQ ID NO: 4291 - RNA, 151 nt, synthetic construct
  misc_feature 1..151: note = Description of Artificial Sequence: Synthetic polynucleotide
  source 1..151: mol_type = other RNA
gtttggtgactgccacgcccagttttagagctagaaatagcaagttaaaataaggctagtccgttatcaacttgaaaaagtggcaccgagtcggtgcgtggtggggactgcggaggccagcagtgaacacccattgggcgtggcttttttt

SEQ ID NO: 4292 - RNA, 151 nt, synthetic construct
  misc_feature 1..151: note = Description of Artificial Sequence: Synthetic polynucleotide
  source 1..151: mol_type = other RNA
gtttggtgactgccacgcccagttttagagctagaaatagcaagttaaaataaggctagtccgttatcaacttgaaaaagtggcaccgagtcggtgcgtggtggggactgcggaggccagcagtgaacaccccttgggcgtggcttttttt

SEQ ID NO: 4293 - RNA, 151 nt, synthetic construct
  misc_feature 1..151: note = Description of Artificial Sequence: Synthetic polynucleotide
  source 1..151: mol_type = other RNA
gtttggtgactgccacgcccagttttagagctagaaatagcaagttaaaataaggctagtccgttatcaacttgaaaaagtggcaccgagtcggtgcggactgcggaggccagcagtgaacacccattgggcgtggcagtcaccttttttt

SEQ ID NO: 4294 - RNA, 151 nt, synthetic construct
  misc_feature 1..151: note = Description of Artificial Sequence: Synthetic polynucleotide
  source 1..151: mol_type = other RNA
gtttggtgactgccacgcccagttttagagctagaaatagcaagttaaaataaggctagtccgttatcaacttgaaaaagtggcaccgagtcggtgcgggactgcggaggccagcagtgaacaccccttgggcgtggcagtcacttttttt

SEQ ID NO: 4295 - RNA, 151 nt, synthetic construct
  misc_feature 1..151: note = Description of Artificial Sequence: Synthetic polynucleotide
  source 1..151: mol_type = other RNA
gtttggtgactgccacgcccagttttagagctagaaatagcaagttaaaataaggctagtccgttatcaacttgaaaaagtggcaccgagtcggtgcgtggtggggactgcggaggccagcagtgaacaccctttgggcgtggcttttttt

SEQ ID NO: 4296 - RNA, 151 nt, synthetic construct
  misc_feature 1..151: note = Description of Artificial Sequence: Synthetic polynucleotide
  source 1..151: mol_type = other RNA
gtttggtgactgccacgcccagttttagagctagaaatagcaagttaaaataaggctagtccgttatcaacttgaaaaagtggcaccgagtcggtgcgtggtggggactgcggaggccagcagtgaacacccgttgggcgtggcttttttt

SEQ ID NO: 4297 - RNA, 151 nt, synthetic construct
  misc_feature 1..151: note = Description of Artificial Sequence: Synthetic polynucleotide
  source 1..151: mol_type = other RNA
gtttggtgactgccacgcccagttttagagctagaaatagcaagttaaaataaggctagtccgttatcaacttgaaaaagtggcaccgagtcggtgcggggactgcggaggccagcagtgaacaccctttgggcgtggcagtcattttttt

SEQ ID NO: 4298 - RNA, 152 nt, synthetic construct
  misc_feature 1..152: note = Description of Artificial Sequence: Synthetic polynucleotide
  source 1..152: mol_type = other RNA
gtttggtgactgccacgcccagttttagagctagaaatagcaagttaaaataaggctagtccgttatcaacttgaaaaagtggcaccgagtcggtgcgggactgcggaggccagcagtgaacacccgttgggcgtggcagtcaccttttttt

SEQ ID NO: 4299 - RNA, 152 nt, synthetic construct
  misc_feature 1..152: note = Description of Artificial Sequence: Synthetic polynucleotide
  source 1..152: mol_type = other RNA
gtttggtgactgccacgcccagttttagagctagaaatagcaagttaaaataaggctagtccgttatcaacttgaaaaagtggcaccgagtcggtgcggtggggactgcggaggccagcagtgaacacccgttgggcgtggcagtttttttt

SEQ ID NO: 4300 - RNA, 152 nt, synthetic construct
  misc_feature 1..152: note = Description of Artificial Sequence: Synthetic polynucleotide
  source 1..152: mol_type = other RNA
gtttggtgactgccacgcccagttttagagctagaaatagcaagttaaaataaggctagtccgttatcaacttgaaaaagtggcaccgagtcggtgcgggactgcggaggccagcagtgaacaccccttgggcgtggcagtcaccttttttt

SEQ ID NO: 4301 - RNA, 152 nt, synthetic construct
  misc_feature 1..152: note = Description of Artificial Sequence: Synthetic polynucleotide
  source 1..152: mol_type = other RNA
gtttggtgactgccacgcccagttttagagctagaaatagcaagttaaaataaggctagtccgttatcaacttgaaaaagtggcaccgagtcggtgctggtggggactgcggaggccagcagtgaacacccgttgggcgtggcagttttttt

SEQ ID NO: 4302 - RNA, 152 nt, synthetic construct
  misc_feature 1..152: note = Description of Artificial Sequence: Synthetic polynucleotide
  source 1..152: mol_type = other RNA
gtttggtgactgccacgcccagttttagagctagaaatagcaagttaaaataaggctagtccgttatcaacttgaaaaagtggcaccgagtcggtgctggggactgcggaggccagcagtgaacaccctttgggcgtggcagtcattttttt

SEQ ID NO: 4303 - RNA, 152 nt, synthetic construct
  misc_feature 1..152: note = Description of Artificial Sequence: Synthetic polynucleotide
  source 1..152: mol_type = other RNA
gtttggtgactgccacgcccagttttagagctagaaatagcaagttaaaataaggctagtccgttatcaacttgaaaaagtggcaccgagtcggtgcgtggggactgcggaggccagcagtgaacacccgttgggcgtggcagtcttttttt

SEQ ID NO: 4304 - RNA, 152 nt, synthetic construct
  misc_feature 1..152: note = Description of Artificial Sequence: Synthetic polynucleotide
  source 1..152: mol_type = other RNA
gtttggtgactgccacgcccagttttagagctagaaatagcaagttaaaataaggctagtccgttatcaacttgaaaaagtggcaccgagtcggtgcggtggggactgcggaggccagcagtgaacaccctttgggcgtggcagtttttttt

SEQ ID NO: 4305 - RNA, 152 nt, synthetic construct
  misc_feature 1..152: note = Description of Artificial Sequence: Synthetic polynucleotide
  source 1..152: mol_type = other RNA
gtttggtgactgccacgcccagttttagagctagaaatagcaagttaaaataaggctagtccgttatcaacttgaaaaagtggcaccgagtcggtgcggggactgcggaggccagcagtgaacacccattgggcgtggcagtcacttttttt

SEQ ID NO: 4306 - RNA, 152 nt, synthetic construct
  misc_feature 1..152: note = Description of Artificial Sequence: Synthetic polynucleotide
  source 1..152: mol_type = other RNA
gtttggtgactgccacgcccagttttagagctagaaatagcaagttaaaataaggctagtccgttatcaacttgaaaaagtggcaccgagtcggtgctggtggggactgcggaggccagcagtgaacaccctttgggcgtggcagttttttt

SEQ ID NO: 4307 - RNA, 152 nt, synthetic construct
  misc_feature 1..152: note = Description of Artificial Sequence: Synthetic polynucleotide
  source 1..152: mol_type = other RNA
gtttggtgactgccacgcccagttttagagctagaaatagcaagttaaaataaggctagtccgttatcaacttgaaaaagtggcaccgagtcggtgcgtggggactgcggaggccagcagtgaacaccctttgggcgtggcagtcttttttt

SEQ ID NO: 4308 - RNA, 152 nt, synthetic construct
  misc_feature 1..152: note = Description of Artificial Sequence: Synthetic polynucleotide
  source 1..152: mol_type = other RNA
gtttggtgactgccacgcccagttttagagctagaaatagcaagttaaaataaggctagtccgttatcaacttgaaaaagtggcaccgagtcggtgctggtggggactgcggaggccagcagtgaacaccccttgggcgtggcagttttttt

SEQ ID NO: 4309 - RNA, 152 nt, synthetic construct
  misc_feature 1..152: note = Description of Artificial Sequence: Synthetic polynucleotide
  source 1..152: mol_type = other RNA
gtttggtgactgccacgcccagttttagagctagaaatagcaagttaaaataaggctagtccgttatcaacttgaaaaagtggcaccgagtcggtgcgtggtggggactgcggaggccagcagtgaacacccgttgggcgtggcattttttt

SEQ ID NO: 4310 - RNA, 152 nt, synthetic construct
  misc_feature 1..152: note = Description of Artificial Sequence: Synthetic polynucleotide
  source 1..152: mol_type = other RNA
gtttggtgactgccacgcccagttttagagctagaaatagcaagttaaaataaggctagtccgttatcaacttgaaaaagtggcaccgagtcggtgcgggactgcggaggccagcagtgaacaccctttgggcgtggcagtcaccttttttt

SEQ ID NO: 4311 - RNA, 152 nt, synthetic construct
  misc_feature 1..152: note = Description of Artificial Sequence: Synthetic polynucleotide
  source 1..152: mol_type = other RNA
gtttggtgactgccacgcccagttttagagctagaaatagcaagttaaaataaggctagtccgttatcaacttgaaaaagtggcaccgagtcggtgcgtggtggggactgcggaggccagcagtgaacacccattgggcgtggcattttttt

SEQ ID NO: 4312 - RNA, 152 nt, synthetic construct
  misc_feature 1..152: note = Description of Artificial Sequence: Synthetic polynucleotide
  source 1..152: mol_type = other RNA
gtttggtgactgccacgcccagttttagagctagaaatagcaagttaaaataaggctagtccgttatcaacttgaaaaagtggcaccgagtcggtgcggggactgcggaggccagcagtgaacaccctttgggcgtggcagtcacttttttt

SEQ ID NO: 4313 - RNA, 152 nt, synthetic construct
  misc_feature 1..152: note = Description of Artificial Sequence: Synthetic polynucleotide
  source 1..152: mol_type = other RNA
gtttggtgactgccacgcccagttttagagctagaaatagcaagttaaaataaggctagtccgttatcaacttgaaaaagtggcaccgagtcggtgcgtggtggggactgcggaggccagcagtgaacaccctttgggcgtggcattttttt

SEQ ID NO: 4314 - RNA, 152 nt, synthetic construct
  misc_feature 1..152: note = Description of Artificial Sequence: Synthetic polynucleotide
  source 1..152: mol_type = other RNA
gtttggtgactgccacgcccagttttagagctagaaatagcaagttaaaataaggctagtccgttatcaacttgaaaaagtggcaccgagtcggtgcggtggggactgcggaggccagcagtgaacaccccttgggcgtggcagtttttttt

SEQ ID NO: 4315 - RNA, 152 nt, synthetic construct
  misc_feature 1..152: note = Description of Artificial Sequence: Synthetic polynucleotide
  source 1..152: mol_type = other RNA
gtttggtgactgccacgcccagttttagagctagaaatagcaagttaaaataaggctagtccgttatcaacttgaaaaagtggcaccgagtcggtgctggggactgcggaggccagcagtgaacaccccttgggcgtggcagtcattttttt

SEQ ID NO: 4316 - RNA, 152 nt, synthetic construct
  misc_feature 1..152: note = Description of Artificial Sequence: Synthetic polynucleotide
  source 1..152: mol_type = other RNA
gtttggtgactgccacgcccagttttagagctagaaatagcaagttaaaataaggctagtccgttatcaacttgaaaaagtggcaccgagtcggtgcggtggggactgcggaggccagcagtgaacacccattgggcgtggcagtttttttt

SEQ ID NO: 4317 - RNA, 152 nt, synthetic construct
  misc_feature 1..152: note = Description of Artificial Sequence: Synthetic polynucleotide
  source 1..152: mol_type = other RNA
gtttggtgactgccacgcccagttttagagctagaaatagcaagttaaaataaggctagtccgttatcaacttgaaaaagtggcaccgagtcggtgcggggactgcggaggccagcagtgaacacccgttgggcgtggcagtcacttttttt

SEQ ID NO: 4318 - RNA, 152 nt, synthetic construct
  misc_feature 1..152: note = Description of Artificial Sequence: Synthetic polynucleotide
  source 1..152: mol_type = other RNA
gtttggtgactgccacgcccagttttagagctagaaatagcaagttaaaataaggctagtccgttatcaacttgaaaaagtggcaccgagtcggtgcggggactgcggaggccagcagtgaacaccccttgggcgtggcagtcacttttttt

SEQ ID NO: 4319 - RNA, 152 nt, synthetic construct
  misc_feature 1..152: note = Description of Artificial Sequence: Synthetic polynucleotide
  source 1..152: mol_type = other RNA
gtttggtgactgccacgcccagttttagagctagaaatagcaagttaaaataaggctagtccgttatcaacttgaaaaagtggcaccgagtcggtgctggggactgcggaggccagcagtgaacacccgttgggcgtggcagtcattttttt

SEQ ID NO: 4320 - RNA, 152 nt, synthetic construct
  misc_feature 1..152: note = Description of Artificial Sequence: Synthetic polynucleotide
  source 1..152: mol_type = other RNA
gtttggtgactgccacgcccagttttagagctagaaatagcaagttaaaataaggctagtccgttatcaacttgaaaaagtggcaccgagtcggtgcgtggggactgcggaggccagcagtgaacacccattgggcgtggcagtcttttttt

SEQ ID NO: 4321 - RNA, 152 nt, synthetic construct
  misc_feature 1..152: note = Description of Artificial Sequence: Synthetic polynucleotide
  source 1..152: mol_type = other RNA
gtttggtgactgccacgcccagttttagagctagaaatagcaagttaaaataaggctagtccgttatcaacttgaaaaagtggcaccgagtcggtgcgtggggactgcggaggccagcagtgaacaccccttgggcgtggcagtcttttttt

SEQ ID NO: 4322 - RNA, 152 nt, synthetic construct
  misc_feature 1..152: note = Description of Artificial Sequence: Synthetic polynucleotide
  source 1..152: mol_type = other RNA
gtttggtgactgccacgcccagttttagagctagaaatagcaagttaaaataaggctagtccgttatcaacttgaaaaagtggcaccgagtcggtgctggtggggactgcggaggccagcagtgaacacccattgggcgtggcagttttttt

SEQ ID NO: 4323 - RNA, 152 nt, synthetic construct
  misc_feature 1..152: note = Description of Artificial Sequence: Synthetic polynucleotide
  source 1..152: mol_type = other RNA
gtttggtgactgccacgcccagttttagagctagaaatagcaagttaaaataaggctagtccgttatcaacttgaaaaagtggcaccgagtcggtgctggggactgcggaggccagcagtgaacacccattgggcgtggcagtcattttttt

SEQ ID NO: 4324 - RNA, 152 nt, synthetic construct
  misc_feature 1..152: note = Description of Artificial Sequence: Synthetic polynucleotide
  source 1..152: mol_type = other RNA
gtttggtgactgccacgcccagttttagagctagaaatagcaagttaaaataaggctagtccgttatcaacttgaaaaagtggcaccgagtcggtgcgtggtggggactgcggaggccagcagtgaacaccccttgggcgtggcattttttt

SEQ ID NO: 4325 - RNA, 152 nt, synthetic construct
  misc_feature 1..152: note = Description of Artificial Sequence: Synthetic polynucleotide
  source 1..152: mol_type = other RNA
gtttggtgactgccacgcccagttttagagctagaaatagcaagttaaaataaggctagtccgttatcaacttgaaaaagtggcaccgagtcggtgcgggactgcggaggccagcagtgaacacccattgggcgtggcagtcaccttttttt

SEQ ID NO: 4326 - RNA, 153 nt, synthetic construct
  misc_feature 1..153: note = Description of Artificial Sequence: Synthetic polynucleotide
  source 1..153: mol_type = other RNA
gtttggtgactgccacgcccagttttagagctagaaatagcaagttaaaataaggctagtccgttatcaacttgaaaaagtggcaccgagtcggtgcggtggggactgcggaggccagcagtgaacaccctttgggcgtggcagtcttttttt

SEQ ID NO: 4327 - RNA, 153 nt, synthetic construct
  misc_feature 1..153: note = Description of Artificial Sequence: Synthetic polynucleotide
  source 1..153: mol_type = other RNA
gtttggtgactgccacgcccagttttagagctagaaatagcaagttaaaataaggctagtccgttatcaacttgaaaaagtggcaccgagtcggtgctggggactgcggaggccagcagtgaacaccctttgggcgtggcagtcacttttttt

SEQ ID NO: 4328 - RNA, 153 nt, synthetic construct
  misc_feature 1..153: note = Description of Artificial Sequence: Synthetic polynucleotide
  source 1..153: mol_type = other RNA
gtttggtgactgccacgcccagttttagagctagaaatagcaagttaaaataaggctagtccgttatcaacttgaaaaagtggcaccgagtcggtgctggtggggactgcggaggccagcagtgaacaccccttgggcgtggcagtttttttt

SEQ ID NO: 4329 - RNA, 153 nt, synthetic construct
  misc_feature 1..153: note = Description of Artificial Sequence: Synthetic polynucleotide
  source 1..153: mol_type = other RNA
gtttggtgactgccacgcccagttttagagctagaaatagcaagttaaaataaggctagtccgttatcaacttgaaaaagtggcaccgagtcggtgctggggactgcggaggccagcagtgaacacccattgggcgtggcagtcacttttttt

SEQ ID NO: 4330 - RNA, 153 nt, synthetic construct
  misc_feature 1..153: note = Description of Artificial Sequence: Synthetic polynucleotide
  source 1..153: mol_type = other RNA
gtttggtgactgccacgcccagttttagagctagaaatagcaagttaaaataaggctagtccgttatcaacttgaaaaagtggcaccgagtcggtgcggtggggactgcggaggccagcagtgaacacccgttgggcgtggcagtcttttttt

SEQ ID NO: 4331 - RNA, 153 nt, synthetic construct
  misc_feature 1..153: note = Description of Artificial Sequence: Synthetic polynucleotide
  source 1..153: mol_type = other RNA
gtttggtgactgccacgcccagttttagagctagaaatagcaagttaaaataaggctagtccgttatcaacttgaaaaagtggcaccgagtcggtgctggggactgcggaggccagcagtgaacaccccttgggcgtggcagtcacttttttt

SEQ ID NO: 4332 - RNA, 153 nt, synthetic construct
  misc_feature 1..153: note = Description of Artificial Sequence: Synthetic polynucleotide
  source 1..153: mol_type = other RNA
gtttggtgactgccacgcccagttttagagctagaaatagcaagttaaaataaggctagtccgttatcaacttgaaaaagtggcaccgagtcggtgcggggactgcggaggccagcagtgaacacccattgggcgtggcagtcaccttttttt

SEQ ID NO: 4333 - RNA, 153 nt, synthetic construct
  misc_feature 1..153: note = Description of Artificial Sequence: Synthetic polynucleotide
  source 1..153: mol_type = other RNA
gtttggtgactgccacgcccagttttagagctagaaatagcaagttaaaataaggctagtccgttatcaacttgaaaaagtggcaccgagtcggtgctggggactgcggaggccagcagtgaacacccgttgggcgtggcagtcacttttttt

SEQ ID NO: 4334 - RNA, 153 nt, synthetic construct
  misc_feature 1..153: note = Description of Artificial Sequence: Synthetic polynucleotide
  source 1..153: mol_type = other RNA
gtttggtgactgccacgcccagttttagagctagaaatagcaagttaaaataaggctagtccgttatcaacttgaaaaagtggcaccgagtcggtgcggggactgcggaggccagcagtgaacaccccttgggcgtggcagtcaccttttttt

SEQ ID NO: 4335 - RNA, 153 nt, synthetic construct
  misc_feature 1..153: note = Description of Artificial Sequence: Synthetic polynucleotide
  source 1..153: mol_type = other RNA
gtttggtgactgccacgcccagttttagagctagaaatagcaagttaaaataaggctagtccgttatcaacttgaaaaagtggcaccgagtcggtgcggggactgcggaggccagcagtgaacacccgttgggcgtggcagtcaccttttttt

SEQ ID NO: 4336 - RNA, 153 nt, synthetic construct
  misc_feature 1..153: note = Description of Artificial Sequence: Synthetic polynucleotide
  source 1..153: mol_type = other RNA
gtttggtgactgccacgcccagttttagagctagaaatagcaagttaaaataaggctagtccgttatcaacttgaaaaagtggcaccgagtcggtgcgtggggactgcggaggccagcagtgaacaccctttgggcgtggcagtcattttttt

SEQ ID NO: 4337 - RNA, 153 nt, synthetic construct
  misc_feature 1..153: note = Description of Artificial Sequence: Synthetic polynucleotide
  source 1..153: mol_type = other RNA
gtttggtgactgccacgcccagttttagagctagaaatagcaagttaaaataaggctagtccgttatcaacttgaaaaagtggcaccgagtcggtgcgtggggactgcggaggccagcagtgaacacccgttgggcgtggcagtcattttttt

SEQ ID NO: 4338 - RNA, 153 nt, synthetic construct
  misc_feature 1..153: note = Description of Artificial Sequence: Synthetic polynucleotide
  source 1..153: mol_type = other RNA
gtttggtgactgccacgcccagttttagagctagaaatagcaagttaaaataaggctagtccgttatcaacttgaaaaagtggcaccgagtcggtgcggtggggactgcggaggccagcagtgaacacccattgggcgtggcagtcttttttt

SEQ ID NO: 4339 - RNA, 153 nt, synthetic construct
  misc_feature 1..153: note = Description of Artificial Sequence: Synthetic polynucleotide
  source 1..153: mol_type = other RNA
gtttggtgactgccacgcccagttttagagctagaaatagcaagttaaaataaggctagtccgttatcaacttgaaaaagtggcaccgagtcggtgcgtggtggggactgcggaggccagcagtgaacaccctttgggcgtggcagttttttt

SEQ ID NO: 4340 - RNA, 153 nt, synthetic construct
  misc_feature 1..153: note = Description of Artificial Sequence: Synthetic polynucleotide
  source 1..153: mol_type = other RNA
gtttggtgactgccacgcccagttttagagctagaaatagcaagttaaaataaggctagtccgttatcaacttgaaaaagtggcaccgagtcggtgcgtggtggggactgcggaggccagcagtgaacacccattgggcgtggcagttttttt

SEQ ID NO: 4341 - RNA, 153 nt, synthetic construct
  misc_feature 1..153: note = Description of Artificial Sequence: Synthetic polynucleotide
  source 1..153: mol_type = other RNA
gtttggtgactgccacgcccagttttagagctagaaatagcaagttaaaataaggctagtccgttatcaacttgaaaaagtggcaccgagtcggtgcgtggggactgcggaggccagcagtgaacacccattgggcgtggcagtcattttttt

SEQ ID NO: 4342 - RNA, 153 nt, synthetic construct
  misc_feature 1..153: note = Description of Artificial Sequence: Synthetic polynucleotide
  source 1..153: mol_type = other RNA
gtttggtgactgccacgcccagttttagagctagaaatagcaagttaaaataaggctagtccgttatcaacttgaaaaagtggcaccgagtcggtgcggggactgcggaggccagcagtgaacaccctttgggcgtggcagtcaccttttttt

SEQ ID NO: 4343 - RNA, 153 nt, synthetic construct
  misc_feature 1..153: note = Description of Artificial Sequence: Synthetic polynucleotide
  source 1..153: mol_type = other RNA
gtttggtgactgccacgcccagttttagagctagaaatagcaagttaaaataaggctagtccgttatcaacttgaaaaagtggcaccgagtcggtgcggtggggactgcggaggccagcagtgaacaccccttgggcgtggcagtcttttttt

SEQ ID NO: 4344 - RNA, 153 nt, synthetic construct
  misc_feature 1..153: note = Description of Artificial Sequence: Synthetic polynucleotide
  source 1..153: mol_type = other RNA
gtttggtgactgccacgcccagttttagagctagaaatagcaagttaaaataaggctagtccgttatcaacttgaaaaagtggcaccgagtcggtgctggtggggactgcggaggccagcagtgaacacccattgggcgtggcagtttttttt

SEQ ID NO: 4345 - RNA, 153 nt, synthetic construct
  misc_feature 1..153: note = Description of Artificial Sequence: Synthetic polynucleotide
  source 1..153: mol_type = other RNA
gtttggtgactgccacgcccagttttagagctagaaatagcaagttaaaataaggctagtccgttatcaacttgaaaaagtggcaccgagtcggtgcgtggggactgcggaggccagcagtgaacaccccttgggcgtggcagtcattttttt

SEQ ID NO: 4346 - RNA, 153 nt, synthetic construct
  misc_feature 1..153: note = Description of Artificial Sequence: Synthetic polynucleotide
  source 1..153: mol_type = other RNA
gtttggtgactgccacgcccagttttagagctagaaatagcaagttaaaataaggctagtccgttatcaacttgaaaaagtggcaccgagtcggtgctggtggggactgcggaggccagcagtgaacaccctttgggcgtggcagtttttttt

SEQ ID NO: 4347 - RNA, 153 nt, synthetic construct
  misc_feature 1..153: note = Description of Artificial Sequence: Synthetic polynucleotide
  source 1..153: mol_type = other RNA
gtttggtgactgccacgcccagttttagagctagaaatagcaagttaaaataaggctagtccgttatcaacttgaaaaagtggcaccgagtcggtgcgtggtggggactgcggaggccagcagtgaacaccccttgggcgtggcagttttttt

SEQ ID NO: 4348 - RNA, 153 nt, synthetic construct
  misc_feature 1..153: note = Description of Artificial Sequence: Synthetic polynucleotide
  source 1..153: mol_type = other RNA
gtttggtgactgccacgcccagttttagagctagaaatagcaagttaaaataaggctagtccgttatcaacttgaaaaagtggcaccgagtcggtgctggtggggactgcggaggccagcagtgaacacccgttgggcgtggcagtttttttt

SEQ ID NO: 4349 - RNA, 153 nt, synthetic construct
  misc_feature 1..153: note = Description of Artificial Sequence: Synthetic polynucleotide
  source 1..153: mol_type = other RNA
gtttggtgactgccacgcccagttttagagctagaaatagcaagttaaaataaggctagtccgttatcaacttgaaaaagtggcaccgagtcggtgcgtggtggggactgcggaggccagcagtgaacacccgttgggcgtggcagttttttt

SEQ ID NO: 4350 - RNA, 154 nt, synthetic construct
  misc_feature 1..154: note = Description of Artificial Sequence: Synthetic polynucleotide
  source 1..154: mol_type = other RNA
gtttggtgactgccacgcccagttttagagctagaaatagcaagttaaaataaggctagtccgttatcaacttgaaaaagtggcaccgagtcggtgcgtggggactgcggaggccagcagtgaacaccctttgggcgtggcagtcacttttttt

SEQ ID NO: 4351 - RNA, 154 nt, synthetic construct
  misc_feature 1..154: note = Description of Artificial Sequence: Synthetic polynucleotide
  source 1..154: mol_type = other RNA
gtttggtgactgccacgcccagttttagagctagaaatagcaagttaaaataaggctagtccgttatcaacttgaaaaagtggcaccgagtcggtgctggggactgcggaggccagcagtgaacaccctttgggcgtggcagtcaccttttttt

SEQ ID NO: 4352 - RNA, 154 nt, synthetic construct
  misc_feature 1..154: note = Description of Artificial Sequence: Synthetic polynucleotide
  source 1..154: mol_type = other RNA
gtttggtgactgccacgcccagttttagagctagaaatagcaagttaaaataaggctagtccgttatcaacttgaaaaagtggcaccgagtcggtgctggtggggactgcggaggccagcagtgaacacccattgggcgtggcagtcttttttt

SEQ ID NO: 4353 - RNA, 154 nt, synthetic construct
  misc_feature 1..154: note = Description of Artificial Sequence: Synthetic polynucleotide
  source 1..154: mol_type = other RNA
gtttggtgactgccacgcccagttttagagctagaaatagcaagttaaaataaggctagtccgttatcaacttgaaaaagtggcaccgagtcggtgcggtggggactgcggaggccagcagtgaacaccctttgggcgtggcagtcattttttt

SEQ ID NO: 4354 - RNA, 154 nt, synthetic construct
  misc_feature 1..154: note = Description of Artificial Sequence: Synthetic polynucleotide
  source 1..154: mol_type = other RNA
gtttggtgactgccacgcccagttttagagctagaaatagcaagttaaaataaggctagtccgttatcaacttgaaaaagtggcaccgagtcggtgctggggactgcggaggccagcagtgaacacccgttgggcgtggcagtcaccttttttt

SEQ ID NO: 4355 - RNA, 154 nt, synthetic construct
  misc_feature 1..154: note = Description of Artificial Sequence: Synthetic polynucleotide
  source 1..154: mol_type = other RNA
gtttggtgactgccacgcccagttttagagctagaaatagcaagttaaaataaggctagtccgttatcaacttgaaaaagtggcaccgagtcggtgcggtggggactgcggaggccagcagtgaacacccgttgggcgtggcagtcattttttt

SEQ ID NO: 4356 - RNA, 154 nt, synthetic construct
  misc_feature 1..154: note = Description of Artificial Sequence: Synthetic polynucleotide
  source 1..154: mol_type = other RNA
gtttggtgactgccacgcccagttttagagctagaaatagcaagttaaaataaggctagtccgttatcaacttgaaaaagtggcaccgagtcggtgctggtggggactgcggaggccagcagtgaacaccccttgggcgtggcagtcttttttt

SEQ ID NO: 4357 - RNA, 154 nt, synthetic construct
  misc_feature 1..154: note = Description of Artificial Sequence: Synthetic polynucleotide
  source 1..154: mol_type = other RNA
gtttggtgactgccacgcccagttttagagctagaaatagcaagttaaaataaggctagtccgttatcaacttgaaaaagtggcaccgagtcggtgctggggactgcggaggccagcagtgaacacccattgggcgtggcagtcaccttttttt

SEQ ID NO: 4358 - RNA, 154 nt, synthetic construct
  misc_feature 1..154: note = Description of Artificial Sequence: Synthetic polynucleotide
  source 1..154: mol_type = other RNA
gtttggtgactgccacgcccagttttagagctagaaatagcaagttaaaataaggctagtccgttatcaacttgaaaaagtggcaccgagtcggtgcgtggtggggactgcggaggccagcagtgaacaccctttgggcgtggcagtttttttt

SEQ ID NO: 4359 - RNA, 154 nt, synthetic construct
  misc_feature 1..154: note = Description of Artificial Sequence: Synthetic polynucleotide
  source 1..154: mol_type = other RNA
gtttggtgactgccacgcccagttttagagctagaaatagcaagttaaaataaggctagtccgttatcaacttgaaaaagtggcaccgagtcggtgcggtggggactgcggaggccagcagtgaacaccccttgggcgtggcagtcattttttt

SEQ ID NO: 4360 - RNA, 154 nt, synthetic construct
  misc_feature 1..154: note = Description of Artificial Sequence: Synthetic polynucleotide
  source 1..154: mol_type = other RNA
gtttggtgactgccacgcccagttttagagctagaaatagcaagttaaaataaggctagtccgttatcaacttgaaaaagtggcaccgagtcggtgcgtggtggggactgcggaggccagcagtgaacacccgttgggcgtggcagtttttttt

SEQ ID NO: 4361 - RNA, 154 nt, synthetic construct
  misc_feature 1..154: note = Description of Artificial Sequence: Synthetic polynucleotide
  source 1..154: mol_type = other RNA
gtttggtgactgccacgcccagttttagagctagaaatagcaagttaaaataaggctagtccgttatcaacttgaaaaagtggcaccgagtcggtgcgtggggactgcggaggccagcagtgaacacccgttgggcgtggcagtcacttttttt

SEQ ID NO: 4362 - RNA, 154 nt, synthetic construct
  misc_feature 1..154: note = Description of Artificial Sequence: Synthetic polynucleotide
  source 1..154: mol_type = other RNA
gtttggtgactgccacgcccagttttagagctagaaatagcaagttaaaataaggctagtccgttatcaacttgaaaaagtggcaccgagtcggtgctggtggggactgcggaggccagcagtgaacaccctttgggcgtggcagtcttttttt

SEQ ID NO: 4363 - RNA, 154 nt, synthetic construct
  misc_feature 1..154: note = Description of Artificial Sequence: Synthetic polynucleotide
  source 1..154: mol_type = other RNA
gtttggtgactgccacgcccagttttagagctagaaatagcaagttaaaataaggctagtccgttatcaacttgaaaaagtggcaccgagtcggtgcggtggggactgcggaggccagcagtgaacacccattgggcgtggcagtcattttttt

SEQ ID NO: 4364 - RNA, 154 nt, synthetic construct
  misc_feature 1..154: note = Description of Artificial Sequence: Synthetic polynucleotide
  source 1..154: mol_type = other RNA
gtttggtgactgccacgcccagttttagagctagaaatagcaagttaaaataaggctagtccgttatcaacttgaaaaagtggcaccgagtcggtgcgtggggactgcggaggccagcagtgaacacccattgggcgtggcagtcacttttttt

SEQ ID NO: 4365 - RNA, 154 nt, synthetic construct
  misc_feature 1..154: note = Description of Artificial Sequence: Synthetic polynucleotide
  source 1..154: mol_type = other RNA
gtttggtgactgccacgcccagttttagagctagaaatagcaagttaaaataaggctagtccgttatcaacttgaaaaagtggcaccgagtcggtgcgtggtggggactgcggaggccagcagtgaacaccccttgggcgtggcagtttttttt

SEQ ID NO: 4366 - RNA, 154 nt, synthetic construct
  misc_feature 1..154: note = Description of Artificial Sequence: Synthetic polynucleotide
  source 1..154: mol_type = other RNA
gtttggtgactgccacgcccagttttagagctagaaatagcaagttaaaataaggctagtccgttatcaacttgaaaaagtggcaccgagtcggtgcgtggtggggactgcggaggccagcagtgaacacccattgggcgtggcagtttttttt

SEQ ID NO: 4367 - RNA, 154 nt, synthetic construct
  misc_feature 1..154: note = Description of Artificial Sequence: Synthetic polynucleotide
  source 1..154: mol_type = other RNA
gtttggtgactgccacgcccagttttagagctagaaatagcaagttaaaataaggctagtccgttatcaacttgaaaaagtggcaccgagtcggtgcgtggggactgcggaggccagcagtgaacaccccttgggcgtggcagtcacttttttt

SEQ ID NO: 4368 - RNA, 154 nt, synthetic construct
  misc_feature 1..154: note = Description of Artificial Sequence: Synthetic polynucleotide
  source 1..154: mol_type = other RNA
gtttggtgactgccacgcccagttttagagctagaaatagcaagttaaaataaggctagtccgttatcaacttgaaaaagtggcaccgagtcggtgctggtggggactgcggaggccagcagtgaacacccgttgggcgtggcagtcttttttt

SEQ ID NO: 4369 - RNA, 154 nt, synthetic construct
  misc_feature 1..154: note = Description of Artificial Sequence: Synthetic polynucleotide
  source 1..154: mol_type = other RNA
gtttggtgactgccacgcccagttttagagctagaaatagcaagttaaaataaggctagtccgttatcaacttgaaaaagtggcaccgagtcggtgctggggactgcggaggccagcagtgaacaccccttgggcgtggcagtcaccttttttt

SEQ ID NO: 4370 - RNA, 155 nt, synthetic construct
  misc_feature 1..155: note = Description of Artificial Sequence: Synthetic polynucleotide
  source 1..155: mol_type = other RNA
gtttggtgactgccacgcccagttttagagctagaaatagcaagttaaaataaggctagtccgttatcaacttgaaaaagtggcaccgagtcggtgcgtggtggggactgcggaggccagcagtgaacacccattgggcgtggcagtcttttttt

SEQ ID NO: 4371 - RNA, 155 nt, synthetic construct
  misc_feature 1..155: note = Description of Artificial Sequence: Synthetic polynucleotide
  source 1..155: mol_type = other RNA
gtttggtgactgccacgcccagttttagagctagaaatagcaagttaaaataaggctagtccgttatcaacttgaaaaagtggcaccgagtcggtgcgtggggactgcggaggccagcagtgaacaccctttgggcgtggcagtcaccttttttt

SEQ ID NO: 4372 - RNA, 155 nt, synthetic construct
  misc_feature 1..155: note = Description of Artificial Sequence: Synthetic polynucleotide
  source 1..155: mol_type = other RNA
gtttggtgactgccacgcccagttttagagctagaaatagcaagttaaaataaggctagtccgttatcaacttgaaaaagtggcaccgagtcggtgctggtggggactgcggaggccagcagtgaacaccctttgggcgtggcagtcattttttt

SEQ ID NO: 4373 - RNA, 155 nt, synthetic construct
  misc_feature 1..155: note = Description of Artificial Sequence: Synthetic polynucleotide
  source 1..155: mol_type = other RNA
gtttggtgactgccacgcccagttttagagctagaaatagcaagttaaaataaggctagtccgttatcaacttgaaaaagtggcaccgagtcggtgcgtggggactgcggaggccagcagtgaacacccgttgggcgtggcagtcaccttttttt

SEQ ID NO: 4374 - RNA, 155 nt, synthetic construct
  misc_feature 1..155: note = Description of Artificial Sequence: Synthetic polynucleotide
  source 1..155: mol_type = other RNA
gtttggtgactgccacgcccagttttagagctagaaatagcaagttaaaataaggctagtccgttatcaacttgaaaaagtggcaccgagtcggtgcgtggggactgcggaggccagcagtgaacaccccttgggcgtggcagtcaccttttttt

SEQ ID NO: 4375 - RNA, 155 nt, synthetic construct
  misc_feature 1..155: note = Description of Artificial Sequence: Synthetic polynucleotide
  source 1..155: mol_type = other RNA
gtttggtgactgccacgcccagttttagagctagaaatagcaagttaaaataaggctagtccgttatcaacttgaaaaagtggcaccgagtcggtgctggtggggactgcggaggccagcagtgaacacccgttgggcgtggcagtcattttttt

SEQ ID NO: 4376 - RNA, 155 nt, synthetic construct
  misc_feature 1..155: note = Description of Artificial Sequence: Synthetic polynucleotide
  source 1..155: mol_type = other RNA
gtttggtgactgccacgcccagttttagagctagaaatagcaagttaaaataaggctagtccgttatcaacttgaaaaagtggcaccgagtcggtgcgtggtggggactgcggaggccagcagtgaacaccccttgggcgtggcagtcttttttt

SEQ ID NO: 4377 - RNA, 155 nt, synthetic construct
  misc_feature 1..155: note = Description of Artificial Sequence: Synthetic polynucleotide
  source 1..155: mol_type = other RNA
gtttggtgactgccacgcccagttttagagctagaaatagcaagttaaaataaggctagtccgttatcaacttgaaaaagtggcaccgagtcggtgcggtggggactgcggaggccagcagtgaacacccattgggcgtggcagtcacttttttt

SEQ ID NO: 4378 - RNA, 155 nt, synthetic construct
  misc_feature 1..155: note = Description of Artificial Sequence: Synthetic polynucleotide
  source 1..155: mol_type = other RNA
gtttggtgactgccacgcccagttttagagctagaaatagcaagttaaaataaggctagtccgttatcaacttgaaaaagtggcaccgagtcggtgcggtggggactgcggaggccagcagtgaacaccccttgggcgtggcagtcacttttttt

SEQ ID NO: 4379 - RNA, 155 nt, synthetic construct
  misc_feature 1..155: note = Description of Artificial Sequence: Synthetic polynucleotide
  source 1..155: mol_type = other RNA
gtttggtgactgccacgcccagttttagagctagaaatagcaagttaaaataaggctagtccgttatcaacttgaaaaagtggcaccgagtcggtgcggtggggactgcggaggccagcagtgaacaccctttgggcgtggcagtcacttttttt

SEQ ID NO: 4380 - RNA, 155 nt, synthetic construct
  misc_feature 1..155: note = Description of Artificial Sequence: Synthetic polynucleotide
  source 1..155: mol_type = other RNA
gtttggtgactgccacgcccagttttagagctagaaatagcaagttaaaataaggctagtccgttatcaacttgaaaaagtggcaccgagtcggtgcgtggtggggactgcggaggccagcagtgaacaccctttgggcgtggcagtcttttttt

SEQ ID NO: 4381 - RNA, 155 nt, synthetic construct
  misc_feature 1..155: note = Description of Artificial Sequence: Synthetic polynucleotide
  source 1..155: mol_type = other RNA
gtttggtgactgccacgcccagttttagagctagaaatagcaagttaaaataaggctagtccgttatcaacttgaaaaagtggcaccgagtcggtgctggtggggactgcggaggccagcagtgaacacccattgggcgtggcagtcattttttt

SEQ ID NO: 4382 - RNA, 155 nt, synthetic construct
  misc_feature 1..155: note = Description of Artificial Sequence: Synthetic polynucleotide
  source 1..155: mol_type = other RNA
gtttggtgactgccacgcccagttttagagctagaaatagcaagttaaaataaggctagtccgttatcaacttgaaaaagtggcaccgagtcggtgcggtggggactgcggaggccagcagtgaacacccgttgggcgtggcagtcacttttttt

SEQ ID NO: 4383 - RNA, 155 nt, synthetic construct
  misc_feature 1..155: note = Description of Artificial Sequence: Synthetic polynucleotide
  source 1..155: mol_type = other RNA
gtttggtgactgccacgcccagttttagagctagaaatagcaagttaaaataaggctagtccgttatcaacttgaaaaagtggcaccgagtcggtgctggtggggactgcggaggccagcagtgaacaccccttgggcgtggcagtcattttttt

SEQ ID NO: 4384 - RNA, 155 nt, synthetic construct
  misc_feature 1..155: note = Description of Artificial Sequence: Synthetic polynucleotide
  source 1..155: mol_type = other RNA
gtttggtgactgccacgcccagttttagagctagaaatagcaagttaaaataaggctagtccgttatcaacttgaaaaagtggcaccgagtcggtgcgtggggactgcggaggccagcagtgaacacccattgggcgtggcagtcaccttttttt

SEQ ID NO: 4385 - RNA, 155 nt, synthetic construct
  misc_feature 1..155: note = Description of Artificial Sequence: Synthetic polynucleotide
  source 1..155: mol_type = other RNA
gtttggtgactgccacgcccagttttagagctagaaatagcaagttaaaataaggctagtccgttatcaacttgaaaaagtggcaccgagtcggtgcgtggtggggactgcggaggccagcagtgaacacccgttgggcgtggcagtcttttttt

SEQ ID NO: 4386 - RNA, 156 nt, synthetic construct
  misc_feature 1..156: note = Description of Artificial Sequence: Synthetic polynucleotide
  source 1..156: mol_type = other RNA
gtttggtgactgccacgcccagttttagagctagaaatagcaagttaaaataaggctagtccgttatcaacttgaaaaagtggcaccgagtcggtgcgtggtggggactgcggaggccagcagtgaacacccgttgggcgtggcagtcattttttt

SEQ ID NO: 4387 - RNA, 156 nt, synthetic construct
  misc_feature 1..156: note = Description of Artificial Sequence: Synthetic polynucleotide
  source 1..156: mol_type = other RNA
gtttggtgactgccacgcccagttttagagctagaaatagcaagttaaaataaggctagtccgttatcaacttgaaaaagtggcaccgagtcggtgcggtggggactgcggaggccagcagtgaacaccctttgggcgtggcagtcaccttttttt

SEQ ID NO: 4388 - RNA, 156 nt, synthetic construct
  misc_feature 1..156: note = Description of Artificial Sequence: Synthetic polynucleotide
  source 1..156: mol_type = other RNA
gtttggtgactgccacgcccagttttagagctagaaatagcaagttaaaataaggctagtccgttatcaacttgaaaaagtggcaccgagtcggtgcggtggggactgcggaggccagcagtgaacaccccttgggcgtggcagtcaccttttttt

SEQ ID NO: 4389 - RNA, 156 nt, synthetic construct
  misc_feature 1..156: note = Description of Artificial Sequence: Synthetic polynucleotide
  source 1..156: mol_type = other RNA
gtttggtgactgccacgcccagttttagagctagaaatagcaagttaaaataaggctagtccgttatcaacttgaaaaagtggcaccgagtcggtgctggtggggactgcggaggccagcagtgaacacccgttgggcgtggcagtcacttttttt

SEQ ID NO: 4390 - RNA, 156 nt, synthetic construct
  misc_feature 1..156: note = Description of Artificial Sequence: Synthetic polynucleotide
  source 1..156: mol_type = other RNA
gtttggtgactgccacgcccagttttagagctagaaatagcaagttaaaataaggctagtccgttatcaacttgaaaaagtggcaccgagtcggtgcgtggtggggactgcggaggccagcagtgaacaccctttgggcgtggcagtcattttttt

SEQ ID NO: 4391 - RNA, 156 nt, synthetic construct
  misc_feature 1..156: note = Description of Artificial Sequence: Synthetic polynucleotide
  source 1..156: mol_type = other RNA
gtttggtgactgccacgcccagttttagagctagaaatagcaagttaaaataaggctagtccgttatcaacttgaaaaagtggcaccgagtcggtgcgtggtggggactgcggaggccagcagtgaacaccccttgggcgtggcagtcattttttt

SEQ ID NO: 4392 - RNA, 156 nt, synthetic construct
  misc_feature 1..156: note = Description of Artificial Sequence: Synthetic polynucleotide
  source 1..156: mol_type = other RNA
gtttggtgactgccacgcccagttttagagctagaaatagcaagttaaaataaggctagtccgttatcaacttgaaaaagtggcaccgagtcggtgctggtggggactgcggaggccagcagtgaacaccctttgggcgtggcagtcacttttttt

SEQ ID NO: 4393 - RNA, 156 nt, synthetic construct
  misc_feature 1..156: note = Description of Artificial Sequence: Synthetic polynucleotide
  source 1..156: mol_type = other RNA
gtttggtgactgccacgcccagttttagagctagaaatagcaagttaaaataaggctagtccgttatcaacttgaaaaagtggcaccgagtcggtgctggtggggactgcggaggccagcagtgaacacccattgggcgtggcagtcacttttttt

SEQ ID NO: 4394 - RNA, 156 nt, synthetic construct
  misc_feature 1..156: note = Description of Artificial Sequence: Synthetic polynucleotide
  source 1..156: mol_type = other RNA
gtttggtgactgccacgcccagttttagagctagaaatagcaagttaaaataaggctagtccgttatcaacttgaaaaagtggcaccgagtcggtgcggtggggactgcggaggccagcagtgaacacccgttgggcgtggcagtcaccttttttt

SEQ ID NO: 4395 - RNA, 156 nt, synthetic construct
  misc_feature 1..156: note = Description of Artificial Sequence: Synthetic polynucleotide
  source 1..156: mol_type = other RNA
gtttggtgactgccacgcccagttttagagctagaaatagcaagttaaaataaggctagtccgttatcaacttgaaaaagtggcaccgagtcggtgcgtggtggggactgcggaggccagcagtgaacacccattgggcgtggcagtcattttttt

SEQ ID NO: 4396 - RNA, 156 nt, synthetic construct
  misc_feature 1..156: note = Description of Artificial Sequence: Synthetic polynucleotide
  source 1..156: mol_type = other RNA
gtttggtgactgccacgcccagttttagagctagaaatagcaagttaaaataaggctagtccgttatcaacttgaaaaagtggcaccgagtcggtgctggtggggactgcggaggccagcagtgaacaccccttgggcgtggcagtcacttttttt

SEQ ID NO: 4397 - RNA, 156 nt, synthetic construct
  misc_feature 1..156: note = Description of Artificial Sequence: Synthetic polynucleotide
  source 1..156: mol_type = other RNA
gtttggtgactgccacgcccagttttagagctagaaatagcaagttaaaataaggctagtccgttatcaacttgaaaaagtggcaccgagtcggtgcggtggggactgcggaggccagcagtgaacacccattgggcgtggcagtcaccttttttt

SEQ ID NO: 4398 - RNA, 157 nt, synthetic construct
  misc_feature 1..157: note = Description of Artificial Sequence: Synthetic polynucleotide
  source 1..157: mol_type = other RNA
gtttggtgactgccacgcccagttttagagctagaaatagcaagttaaaataaggctagtccgttatcaacttgaaaaagtggcaccgagtcggtgcgtggtggggactgcggaggccagcagtgaacaccccttgggcgtggcagtcacttttttt

SEQ ID NO: 4399 - RNA, 157 nt, synthetic construct
  misc_feature 1..157: note = Description of Artificial Sequence: Synthetic polynucleotide
  source 1..157: mol_type = other RNA
gtttggtgactgccacgcccagttttagagctagaaatagcaagttaaaataaggctagtccgttatcaacttgaaaaagtggcaccgagtcggtgcgtggtggggactgcggaggccagcagtgaacacccgttgggcgtggcagtcacttttttt

SEQ ID NO: 4400 - RNA, 157 nt, synthetic construct
  misc_feature 1..157: note = Description of Artificial Sequence: Synthetic polynucleotide
  source 1..157: mol_type = other RNA
gtttggtgactgccacgcccagttttagagctagaaatagcaagttaaaataaggctagtccgttatcaacttgaaaaagtggcaccgagtcggtgctggtggggactgcggaggccagcagtgaacaccctttgggcgtggcagtcaccttttttt

SEQ ID NO: 4401 - RNA, 157 nt, synthetic construct
  misc_feature 1..157: note = Description of Artificial Sequence: Synthetic polynucleotide
  source 1..157: mol_type = other RNA
gtttggtgactgccacgcccagttttagagctagaaatagcaagttaaaataaggctagtccgttatcaacttgaaaaagtggcaccgagtcggtgctggtggggactgcggaggccagcagtgaacaccccttgggcgtggcagtcaccttttttt

SEQ ID NO: 4402 - RNA, 157 nt, synthetic construct
  misc_feature 1..157: note = Description of Artificial Sequence: Synthetic polynucleotide
  source 1..157: mol_type = other RNA
gtttggtgactgccacgcccagttttagagctagaaatagcaagttaaaataaggctagtccgttatcaacttgaaaaagtggcaccgagtcggtgcgtggtggggactgcggaggccagcagtgaacacccattgggcgtggcagtcacttttttt

SEQ ID NO: 4403 - RNA, 157 nt, synthetic construct
  misc_feature 1..157: note = Description of Artificial Sequence: Synthetic polynucleotide
  source 1..157: mol_type = other RNA
gtttggtgactgccacgcccagttttagagctagaaatagcaagttaaaataaggctagtccgttatcaacttgaaaaagtggcaccgagtcggtgcgtggtggggactgcggaggccagcagtgaacaccctttgggcgtggcagtcacttttttt

SEQ ID NO: 4404 - RNA, 157 nt, synthetic construct
  misc_feature 1..157: note = Description of Artificial Sequence: Synthetic polynucleotide
  source 1..157: mol_type = other RNA
gtttggtgactgccacgcccagttttagagctagaaatagcaagttaaaataaggctagtccgttatcaacttgaaaaagtggcaccgagtcggtgctggtggggactgcggaggccagcagtgaacacccattgggcgtggcagtcaccttttttt

SEQ ID NO: 4405 - RNA, 157 nt, synthetic construct
  misc_feature 1..157: note = Description of Artificial Sequence: Synthetic polynucleotide
  source 1..157: mol_type = other RNA
gtttggtgactgccacgcccagttttagagctagaaatagcaagttaaaataaggctagtccgttatcaacttgaaaaagtggcaccgagtcggtgctggtggggactgcggaggccagcagtgaacacccgttgggcgtggcagtcaccttttttt

SEQ ID NO: 4406 - RNA, 158 nt, synthetic construct
  misc_feature 1..158: note = Description of Artificial Sequence: Synthetic polynucleotide
  source 1..158: mol_type = other RNA
gtttggtgactgccacgcccagttttagagctagaaatagcaagttaaaataaggctagtccgttatcaacttgaaaaagtggcaccgagtcggtgcgtggtggggactgcggaggccagcagtgaacacccgttgggcgtggcagtcaccttttttt

SEQ ID NO: 4407 - RNA, 158 nt, synthetic construct
  misc_feature 1..158: note = Description of Artificial Sequence: Synthetic polynucleotide
  source 1..158: mol_type = other RNA
gtttggtgactgccacgcccagttttagagctagaaatagcaagttaaaataaggctagtccgttatcaacttgaaaaagtggcaccgagtcggtgcgtggtggggactgcggaggccagcagtgaacaccctttgggcgtggcagtcaccttttttt

SEQ ID NO: 4408 - RNA, 158 nt, synthetic construct
  misc_feature 1..158: note = Description of Artificial Sequence: Synthetic polynucleotide
  source 1..158: mol_type = other RNA
gtttggtgactgccacgcccagttttagagctagaaatagcaagttaaaataaggctagtccgttatcaacttgaaaaagtggcaccgagtcggtgcgtggtggggactgcggaggccagcagtgaacaccccttgggcgtggcagtcaccttttttt

SEQ ID NO: 4409 - RNA, 158 nt, synthetic construct
  misc_feature 1..158: note = Description of Artificial Sequence: Synthetic polynucleotide
  source 1..158: mol_type = other RNA
gtttggtgactgccacgcccagttttagagctagaaatagcaagttaaaataaggctagtccgttatcaacttgaaaaagtggcaccgagtcggtgcgtggtggggactgcggaggccagcagtgaacacccattgggcgtggcagtcaccttttttt

SEQ ID NO: 4410 - RNA, 96 nt, synthetic construct
  misc_feature 1..96: note = Description of Artificial Sequence: Synthetic oligonucleotide
  source 1..96: mol_type = other RNA
gccagcagtgaacacccattgttttagagctagaaatagcaagttaaaataaggctagtccgttatcaacttgaaaaagtggcaccgagtcggtgc

SEQ ID NO: 4411 - RNA, 96 nt, synthetic construct
  misc_feature 1..96: note = Description of Artificial Sequence: Synthetic oligonucleotide
  source 1..96: mol_type = other RNA
ggtcatgcgggtgctcctgcgttttagagctagaaatagcaagttaaaataaggctagtccgttatcaacttgaaaaagtggcaccgagtcggtgc

SEQ ID NO: 4412 - RNA, 96 nt, synthetic construct
  misc_feature 1..96: note = Description of Artificial Sequence: Synthetic oligonucleotide
  source 1..96: mol_type = other RNA
ggccagcagtgaacacccgtgttttagagctagaaatagcaagttaaaataaggctagtccgttatcaacttgaaaaagtggcaccgagtcggtgc

SEQ ID NO: 4413 - RNA, 96 nt, synthetic construct
  misc_feature 1..96: note = Description of Artificial Sequence: Synthetic oligonucleotide
  source 1..96: mol_type = other RNA
ggccagcagtgaacacccatgttttagagctagaaatagcaagttaaaataaggctagtccgttatcaacttgaaaaagtggcaccgagtcggtgc

SEQ ID NO: 4414 - RNA, 96 nt, synthetic construct
  misc_feature 1..96: note = Description of Artificial Sequence: Synthetic oligonucleotide
  source 1..96: mol_type = other RNA
gccagcagtgaacacccgttgttttagagctagaaatagcaagttaaaataaggctagtccgttatcaacttgaaaaagtggcaccgagtcggtgc

SEQ ID NO: 4415 - RNA, 96 nt, synthetic construct
  misc_feature 1..96: note = Description of Artificial Sequence: Synthetic oligonucleotide
  source 1..96: mol_type = other RNA
cagtgaacacccgttgggcggttttagagctagaaatagcaagttaaaataaggctagtccgttatcaacttgaaaaagtggcaccgagtcggtgc

SEQ ID NO: 4416 - RNA, 96 nt, synthetic construct
  misc_feature 1..96: note = Description of Artificial Sequence: Synthetic oligonucleotide
  source 1..96: mol_type = other RNA
atggcgtccccagggtcatggttttagagctagaaatagcaagttaaaataaggctagtccgttatcaacttgaaaaagtggcaccgagtcggtgc

SEQ ID NO: 4417 - RNA, 96 nt, synthetic construct
  misc_feature 1..96: note = Description of Artificial Sequence: Synthetic oligonucleotide
  source 1..96: mol_type = other RNA
cagtgaacacccattgggcggttttagagctagaaatagcaagttaaaataaggctagtccgttatcaacttgaaaaagtggcaccgagtcggtgc

SEQ ID NO: 4418 - RNA, 96 nt, synthetic construct
  misc_feature 1..96: note = Description of Artificial Sequence: Synthetic oligonucleotide
  source 1..96: mol_type = other RNA
tggcgtccccagggtcatgcgttttagagctagaaatagcaagttaaaataaggctagtccgttatcaacttgaaaaagtggcaccgagtcggtgc

SEQ ID NO: 4419 - RNA, 97 nt, synthetic construct
  misc_feature 1..97: note = Description of Artificial Sequence: Synthetic oligonucleotide
  source 1..97: mol_type = other RNA
gcagtgaacacccattgggcggttttagagctagaaatagcaagttaaaataaggctagtccgttatcaacttgaaaaagtggcaccgagtcggtgc

SEQ ID NO: 4420 - RNA, 97 nt, synthetic construct
  misc_feature 1..97: note = Description of Artificial Sequence: Synthetic oligonucleotide
  source 1..97: mol_type = other RNA
gatggcgtccccagggtcatggttttagagctagaaatagcaagttaaaataaggctagtccgttatcaacttgaaaaagtggcaccgagtcggtgc

SEQ ID NO: 4421 - RNA, 97 nt, synthetic construct
  misc_feature 1..97: note = Description of Artificial Sequence: Synthetic oligonucleotide
  source 1..97: mol_type = other RNA
gcagtgaacacccgttgggcggttttagagctagaaatagcaagttaaaataaggctagtccgttatcaacttgaaaaagtggcaccgagtcggtgc

SEQ ID NO: 4422 - RNA, 97 nt, synthetic construct
  misc_feature 1..97: note = Description of Artificial Sequence: Synthetic oligonucleotide
  source 1..97: mol_type = other RNA
gtggcgtccccagggtcatgcgttttagagctagaaatagcaagttaaaataaggctagtccgttatcaacttgaaaaagtggcaccgagtcggtgc

SEQ ID NO: 4423 - RNA, 100 nt, synthetic construct
  misc_feature 1..100: note = Description of Artificial Sequence: Synthetic polynucleotide
  source 1..100: mol_type = other RNA
gccagcagtgaacacccgttgttttagagctagaaatagcaagttaaaataaggctagtccgttatcaacttgaaaaagtggcaccgagtcggtgctttt

SEQ ID NO: 4424 - RNA, 100 nt, synthetic construct
  misc_feature 1..100: note = Description of Artificial Sequence: Synthetic polynucleotide
  source 1..100: mol_type = other RNA
ggccagcagtgaacacccgtgttttagagctagaaatagcaagttaaaataaggctagtccgttatcaacttgaaaaagtggcaccgagtcggtgctttt

SEQ ID NO: 4425 - RNA, 20 nt, synthetic construct
  misc_feature 1..20: note = Description of Artificial Sequence: Synthetic oligonucleotide
  source 1..20: mol_type = other RNA
ttggtgactgccacgcccaa

SEQ ID NO: 4426-4428 - skipped (3 entries)

SEQ ID NO: 4429 - RNA, 10 nt, synthetic construct
  misc_feature 1..10: note = Description of Artificial Sequence: Synthetic oligonucleotide
  source 1..10: mol_type = other RNA
ggcgtggcag

SEQ ID NO: 4430 - RNA, 11 nt, synthetic construct
  misc_feature 1..11: note = Description of Artificial Sequence: Synthetic oligonucleotide
  source 1..11: mol_type = other RNA
ggcgtggcagt

SEQ ID NO: 4431 - RNA, 12 nt, synthetic construct
  misc_feature 1..12: note = Description of Artificial Sequence: Synthetic oligonucleotide
  source 1..12: mol_type = other RNA
ggcgtggcagtc

SEQ ID NO: 4432 - RNA, 13 nt, synthetic construct
  misc_feature 1..13: note = Description of Artificial Sequence: Synthetic oligonucleotide
  source 1..13: mol_type = other RNA
ggcgtggcagtca

SEQ ID NO: 4433 - RNA, 14 nt, synthetic construct
  misc_feature 1..14: note = Description of Artificial Sequence: Synthetic oligonucleotide
  source 1..14: mol_type = other RNA
ggcgtggcagtcac

SEQ ID NO: 4434 - RNA, 15 nt, synthetic construct
  misc_feature 1..15: note = Description of Artificial Sequence: Synthetic oligonucleotide
  source 1..15: mol_type = other RNA
ggcgtggcagtcacc

SEQ ID NO: 4435 - RNA, 16 nt, synthetic construct
  misc_feature 1..16: note = Description of Artificial Sequence: Synthetic oligonucleotide
  source 1..16: mol_type = other RNA
ggcgtggcagtcacca

SEQ ID NO: 4436 - RNA, 17 nt, synthetic construct
  misc_feature 1..17: note = Description of Artificial Sequence: Synthetic oligonucleotide
  source 1..17: mol_type = other RNA
ggcgtggcagtcaccaa

SEQ ID NO: 4437 - RNA, 10 nt, synthetic construct
  misc_feature 1..10: note = Description of Artificial Sequence: Synthetic oligonucleotide
  source 1..10: mol_type = other RNA
acatcccttg

SEQ ID NO: 4438 - RNA, 10 nt, synthetic construct
  misc_feature 1..10: note = Description of Artificial Sequence: Synthetic oligonucleotide
  source 1..10: mol_type = other RNA
acaccccttg

SEQ ID NO: 4439 - RNA, 11 nt, synthetic construct
  misc_feature 1..11: note = Description of Artificial Sequence: Synthetic oligonucleotide
  source 1..11: mol_type = other RNA
aacatcccttg

SEQ ID NO: 4440 - RNA, 11 nt, synthetic construct
  misc_feature 1..11: note = Description of Artificial Sequence: Synthetic oligonucleotide
  source 1..11: mol_type = other RNA
aacaccccttg

SEQ ID NO: 4441 - RNA, 12 nt, synthetic construct
  misc_feature 1..12: note = Description of Artificial Sequence: Synthetic oligonucleotide
  source 1..12: mol_type = other RNA
gaacaccccttg

SEQ ID NO: 4442 - RNA, 12 nt, synthetic construct
  misc_feature 1..12: note = Description of Artificial Sequence: Synthetic oligonucleotide
  source 1..12: mol_type = other RNA
gaacatcccttg

SEQ ID NO: 4443 - RNA, 13 nt, synthetic construct
  misc_feature 1..13: note = Description of Artificial Sequence: Synthetic oligonucleotide
  source 1..13: mol_type = other RNA
tgaacatcccttg

SEQ ID NO: 4444 - RNA, 13 nt, synthetic construct
  misc_feature 1..13: note = Description of Artificial Sequence: Synthetic oligonucleotide
  source 1..13: mol_type = other RNA
tgaacaccccttg

SEQ ID NO: 4445 - RNA, 14 nt, synthetic construct
  misc_feature 1..14: note = Description of Artificial Sequence: Synthetic oligonucleotide
  source 1..14: mol_type = other RNA
gtgaacatcccttg

SEQ ID NO: 4446 - RNA, 14 nt, synthetic construct
  misc_feature 1..14: note = Description of Artificial Sequence: Synthetic oligonucleotide
  source 1..14: mol_type = other RNA
gtgaacaccccttg

SEQ ID NO: 4447 - RNA, 15 nt, synthetic construct
  misc_feature 1..15: note = Description of Artificial Sequence: Synthetic oligonucleotide
  source 1..15: mol_type = other RNA
agtgaacatcccttg

SEQ ID NO: 4448 - RNA, 15 nt, synthetic construct
  misc_feature 1..15: note = Description of Artificial Sequence: Synthetic oligonucleotide
  source 1..15: mol_type = other RNA
agtgaacaccccttg

SEQ ID NO: 4449 - RNA, 16 nt, synthetic construct
  misc_feature 1..16: note = Description of Artificial Sequence: Synthetic oligonucleotide
  source 1..16: mol_type = other RNA
cagtgaacaccccttg

SEQ ID NO: 4450 - RNA, 17 nt, synthetic construct
  misc_feature 1..17: note = Description of Artificial Sequence: Synthetic oligonucleotide
  source 1..17: mol_type = other RNA
gcagtgaacaccccttg

SEQ ID NO: 4451 - RNA, 17 nt, synthetic construct
  misc_feature 1..17: note = Description of Artificial Sequence: Synthetic oligonucleotide
  source 1..17: mol_type = other RNA
gcagtgaacatcccttg

SEQ ID NO: 4452 - RNA, 18 nt, synthetic construct
  misc_feature 1..18: note = Description of Artificial Sequence: Synthetic oligonucleotide
  source 1..18: mol_type = other RNA
agcagtgaacaccccttg

SEQ ID NO: 4453 - RNA, 18 nt, synthetic construct
  misc_feature 1..18: note = Description of Artificial Sequence: Synthetic oligonucleotide
  source 1..18: mol_type = other RNA
agcagtgaacatcccttg

SEQ ID NO: 4454 - RNA, 20 nt, synthetic construct
  misc_feature 1..20: note = Description of Artificial Sequence: Synthetic oligonucleotide
  source 1..20: mol_type = other RNA
ccagcagtgaacaccccttg

SEQ ID NO: 4455 - RNA, 21 nt, synthetic construct
  misc_feature 1..21: note = Description of Artificial Sequence: Synthetic oligonucleotide
  source 1..21: mol_type = other RNA
gccagcagtgaacatcccttg

SEQ ID NO: 4456 - RNA, 21 nt, synthetic construct
  misc_feature 1..21: note = Description of Artificial Sequence: Synthetic oligonucleotide
  source 1..21: mol_type = other RNA
gccagcagtgaacaccccttg

SEQ ID NO: 4457 - RNA, 22 nt, synthetic construct
  misc_feature 1..22: note = Description of Artificial Sequence: Synthetic oligonucleotide
  source 1..22: mol_type = other RNA
ggccagcagtgaacaccccttg

SEQ ID NO: 4458 - RNA, 23 nt, synthetic construct
  misc_feature 1..23: note = Description of Artificial Sequence: Synthetic oligonucleotide
  source 1..23: mol_type = other RNA
aggccagcagtgaacaccccttg

SEQ ID NO: 4459 - RNA, 24 nt, synthetic construct
  misc_feature 1..24: note = Description of Artificial Sequence: Synthetic oligonucleotide
  source 1..24: mol_type = other RNA
gaggccagcagtgaacaccccttg

SEQ ID NO: 4460 - RNA, 25 nt, synthetic construct
  misc_feature 1..25: note = Description of Artificial Sequence: Synthetic oligonucleotide
  source 1..25: mol_type = other RNA
ggaggccagcagtgaacaccccttg

SEQ ID NO: 4461 - RNA, 26 nt, synthetic construct
  misc_feature 1..26: note = Description of Artificial Sequence: Synthetic oligonucleotide
  source 1..26: mol_type = other RNA
cggaggccagcagtgaacaccccttg

SEQ ID NO: 4462 - RNA, 27 nt, synthetic construct
  misc_feature 1..27: note = Description of Artificial Sequence: Synthetic oligonucleotide
  source 1..27: mol_type = other RNA
gcggaggccagcagtgaacaccccttg

SEQ ID NO: 4463 - RNA, 28 nt, synthetic construct
  misc_feature 1..28: note = Description of Artificial Sequence: Synthetic oligonucleotide
  source 1..28: mol_type = other RNA
tgcggaggccagcagtgaacaccccttg

SEQ ID NO: 4464 - RNA, 30 nt, synthetic construct
  misc_feature 1..30: note = Description of Artificial Sequence: Synthetic oligonucleotide
  source 1..30: mol_type = other RNA
actgcggaggccagcagtgaacaccccttg

SEQ ID NO: 4465 - RNA, 31 nt, synthetic construct
  misc_feature 1..31: note = Description of Artificial Sequence: Synthetic oligonucleotide
  source 1..31: mol_type = other RNA
gactgcggaggccagcagtgaacaccccttg

SEQ ID NO: 4466 - RNA, 32 nt, synthetic construct
  misc_feature 1..32: note = Description of Artificial Sequence: Synthetic oligonucleotide
  source 1..32: mol_type = other RNA
ggactgcggaggccagcagtgaacaccccttg

SEQ ID NO: 4467 - RNA, 33 nt, synthetic construct
  misc_feature 1..33: note = Description of Artificial Sequence: Synthetic oligonucleotide
  source 1..33: mol_type = other RNA
gggactgcggaggccagcagtgaacaccccttg

SEQ ID NO: 4468 - RNA, 34 nt, synthetic construct
  misc_feature 1..34: note = Description of Artificial Sequence: Synthetic oligonucleotide
  source 1..34: mol_type = other RNA
ggggactgcggaggccagcagtgaacaccccttg

SEQ ID NO: 4469 - RNA, 35 nt, synthetic construct
  misc_feature 1..35: note = Description of Artificial Sequence: Synthetic oligonucleotide
  source 1..35: mol_type = other RNA
tggggactgcggaggccagcagtgaacaccccttg

SEQ ID NO: 4470 - RNA, 36 nt, synthetic construct
  misc_feature 1..36: note = Description of Artificial Sequence: Synthetic oligonucleotide
  source 1..36: mol_type = other RNA
gtggggactgcggaggccagcagtgaacaccccttg

SEQ ID NO: 4471 - RNA, 37 nt, synthetic construct
  misc_feature 1..37: note = Description of Artificial Sequence: Synthetic oligonucleotide
  source 1..37: mol_type = other RNA
ggtggggactgcggaggccagcagtgaacaccccttg

SEQ ID NO: 4472 - RNA, 38 nt, synthetic construct
  misc_feature 1..38: note = Description of Artificial Sequence: Synthetic oligonucleotide
  source 1..38: mol_type = other RNA
tggtggggactgcggaggccagcagtgaacaccccttg

SEQ ID NO: 4473 - RNA, 39 nt, synthetic construct
  misc_feature 1..39: note = Description of Artificial Sequence: Synthetic oligonucleotide
  source 1..39: mol_type = other RNA
gtggtggggactgcggaggccagcagtgaacaccccttg

SEQ ID NO: 4474 - RNA, 40 nt, synthetic construct
  misc_feature 1..40: note = Description of Artificial Sequence: Synthetic oligonucleotide
  source 1..40: mol_type = other RNA
tgtggtggggactgcggaggccagcagtgaacaccccttg

SEQ ID NO: 4475 - RNA, 42 nt, synthetic construct
  misc_feature 1..42: note = Description of Artificial Sequence: Synthetic oligonucleotide
  source 1..42: mol_type = other RNA
gctgtggtggggactgcggaggccagcagtgaacaccccttg

SEQ ID NO: 4476 - RNA, 44 nt, synthetic construct
  misc_feature 1..44: note = Description of Artificial Sequence: Synthetic oligonucleotide
  source 1..44: mol_type = other RNA
tggctgtggtggggactgcggaggccagcagtgaacaccccttg

SEQ ID NO: 4477 - RNA, 46 nt, synthetic construct
  misc_feature 1..46: note = Description of Artificial Sequence: Synthetic oligonucleotide
  source 1..46: mol_type = other RNA
tctggctgtggtggggactgcggaggccagcagtgaacaccccttg

SEQ ID NO: 4478 - RNA, 48 nt, synthetic construct
  misc_feature 1..48: note = Description of Artificial Sequence: Synthetic oligonucleotide
  source 1..48: mol_type = other RNA
gttctggctgtggtggggactgcggaggccagcagtgaacaccccttg

SEQ ID NO: 4479 - RNA, 50 nt, synthetic construct
  misc_feature 1..50: note = Description of Artificial Sequence: Synthetic oligonucleotide
  source 1..50: mol_type = other RNA
aggttctggctgtggtggggactgcggaggccagcagtgaacaccccttg

SEQ ID NO: 4480 - RNA, 52 nt, synthetic construct
  misc_feature 1..52: note = Description of Artificial Sequence: Synthetic oligonucleotide
  source 1..52: mol_type = other RNA
gaaggttctggctgtggtggggactgcggaggccagcagtgaacaccccttg

SEQ ID NO: 4481 - RNA, 54 nt, synthetic construct
  misc_feature 1..54: note = Description of Artificial Sequence: Synthetic oligonucleotide
  source 1..54: mol_type = other RNA
aggaaggttctggctgtggtggggactgcggaggccagcagtgaacaccccttg

SEQ ID NO: 4482 - RNA, 56 nt, synthetic construct
  misc_feature 1..56: note = Description of Artificial Sequence: Synthetic oligonucleotide
  source 1..56: mol_type = other RNA
tcaggaaggttctggctgtggtggggactgcggaggccagcagtgaacaccccttg

SEQ ID NO: 4483 - RNA, 58 nt, synthetic construct
  misc_feature 1..58: note = Description of Artificial Sequence: Synthetic oligonucleotide
  source 1..58: mol_type = other RNA
cctcaggaaggttctggctgtggtggggactgcggaggccagcagtgaacaccccttg

SEQ ID NO: 4484 - RNA, 60 nt, synthetic construct
  misc_feature 1..60: note = Description of Artificial Sequence: Synthetic oligonucleotide
  source 1..60: mol_type = other RNA
cccctcaggaaggttctggctgtggtggggactgcggaggccagcagtgaacaccccttg

SEQ ID NO: 4485 - RNA, 62 nt, synthetic construct
  misc_feature 1..62: note = Description of Artificial Sequence: Synthetic oligonucleotide
  source 1..62: mol_type = other RNA
tgcccctcaggaaggttctggctgtggtggggactgcggaggccagcagtgaacaccccttg

SEQ ID NO: 4486 - RNA, 64 nt, synthetic construct
  misc_feature 1..64: note = Description of Artificial Sequence: Synthetic oligonucleotide
  source 1..64: mol_type = other RNA
actgcccctcaggaaggttctggctgtggtggggactgcggaggccagcagtgaacaccccttg

SEQ ID NO: 4487 - RNA, 66 nt, synthetic construct
  misc_feature 1..66: note = Description of Artificial Sequence: Synthetic oligonucleotide
  source 1..66: mol_type = other RNA
acactgcccctcaggaaggttctggctgtggtggggactgcggaggccagcagtgaacaccccttg

SEQ ID NO: 4488 - RNA, 68 nt, synthetic construct
  misc_feature 1..68: note = Description of Artificial Sequence: Synthetic oligonucleotide
  source 1..68: mol_type = other RNA
ccacactgcccctcaggaaggttctggctgtggtggggactgcggaggccagcagtgaacaccccttg

SEQ ID NO: 4489 - RNA, 70 nt, synthetic construct
  misc_feature 1..70: note = Description of Artificial Sequence: Synthetic oligonucleotide
  source 1..70: mol_type = other RNA
ggccacactgcccctcaggaaggttctggctgtggtggggactgcggaggccagcagtgaacaccccttg

SEQ ID NO: 4490 - RNA, 72 nt, synthetic construct
  misc_feature 1..72: note = Description of Artificial Sequence: Synthetic oligonucleotide
  source 1..72: mol_type = other RNA
gtggccacactgcccctcaggaaggttctggctgtggtggggactgcggaggccagcagtgaacaccccttg

SEQ ID NO: 4491 - RNA, 74 nt, synthetic construct
  misc_feature 1..74: note = Description of Artificial Sequence: Synthetic oligonucleotide
  source 1..74: mol_type = other RNA
atgtggccacactgcccctcaggaaggttctggctgtggtggggactgcggaggccagcagtgaacaccccttg

SEQ ID NO: 4492 - RNA, 76 nt, synthetic construct
  misc_feature 1..76: note = Description of Artificial Sequence: Synthetic oligonucleotide
  source 1..76: mol_type = other RNA
ggatgtggccacactgcccctcaggaaggttctggctgtggtggggactgcggaggccagcagtgaacaccccttg

SEQ ID NO: 4493 - RNA, 113 nt, synthetic construct
  misc_feature 1..113: note = Description of Artificial Sequence: Synthetic polynucleotide
  source 1..113: mol_type = other RNA
ttggtgactgccacgcccaagttttagagctagaaatagcaagttaaaataaggctagtccgttatcaacttgaaaaagtggcaccgagtcggtgcacaccccttgggcgtgg

SEQ ID NO: 4494 - RNA, 114 nt, synthetic construct
  misc_feature 1..114: note = Description of Artificial Sequence: Synthetic polynucleotide
  source 1..114: mol_type = other RNA
ttggtgactgccacgcccaagttttagagctagaaatagcaagttaaaataaggctagtccgttatcaacttgaaaaagtggcaccgagtcggtgcacatcccttgggcgtggc

SEQ ID NO: 4495 - RNA, 114 nt, synthetic construct
  misc_feature 1..114: note = Description of Artificial Sequence: Synthetic polynucleotide
  source 1..114: mol_type = other RNA
ttggtgactgccacgcccaagttttagagctagaaatagcaagttaaaataaggctagtccgttatcaacttgaaaaagtggcaccgagtcggtgcacaccccttgggcgtggc

SEQ ID NO: 4496 - RNA, 114 nt, synthetic construct
  misc_feature 1..114: note = Description of Artificial Sequence: Synthetic polynucleotide
  source 1..114: mol_type = other RNA
ttggtgactgccacgcccaagttttagagctagaaatagcaagttaaaataaggctagtccgttatcaacttgaaaaagtggcaccgagtcggtgcaacaccccttgggcgtgg

SEQ ID NO: 4497 - RNA, 115 nt, synthetic construct
  misc_feature 1..115: note = Description of Artificial Sequence: Synthetic polynucleotide
  source 1..115: mol_type = other RNA
ttggtgactgccacgcccaagttttagagctagaaatagcaagttaaaataaggctagtccgttatcaacttgaaaaagtggcaccgagtcggtgcgaacaccccttgggcgtgg

SEQ ID NO: 4498 - RNA, 115 nt, synthetic construct
  misc_feature 1..115: note = Description of Artificial Sequence: Synthetic polynucleotide
  source 1..115: mol_type = other RNA
ttggtgactgccacgcccaagttttagagctagaaatagcaagttaaaataaggctagtccgttatcaacttgaaaaagtggcaccgagtcggtgcacatcccttgggcgtggca

SEQ ID NO: 4499 - RNA, 115 nt, synthetic construct
  misc_feature 1..115: note = Description of Artificial Sequence: Synthetic polynucleotide
  source 1..115: mol_type = other RNA
ttggtgactgccacgcccaagttttagagctagaaatagcaagttaaaataaggctagtccgttatcaacttgaaaaagtggcaccgagtcggtgcacaccccttgggcgtggca

SEQ ID NO: 4500 - RNA, 115 nt, synthetic construct
  misc_feature 1..115: note = Description of Artificial Sequence: Synthetic polynucleotide
  source 1..115: mol_type = other RNA
ttggtgactgccacgcccaagttttagagctagaaatagcaagttaaaataaggctagtccgttatcaacttgaaaaagtggcaccgagtcggtgcaacaccccttgggcgtggc

SEQ ID NO: 4501 - RNA, 115 nt, synthetic construct
  misc_feature 1..115: note = Description of Artificial Sequence: Synthetic polynucleotide
  source 1..115: mol_type = other RNA
ttggtgactgccacgcccaagttttagagctagaaatagcaagttaaaataaggctagtccgttatcaacttgaaaaagtggcaccgagtcggtgcaacatcccttgggcgtggc

SEQ ID NO: 4502 - RNA, 116 nt, synthetic construct
  misc_feature 1..116: note = Description of Artificial Sequence: Synthetic polynucleotide
  source 1..116: mol_type = other RNA
ttggtgactgccacgcccaagttttagagctagaaatagcaagttaaaataaggctagtccgttatcaacttgaaaaagtggcaccgagtcggtgcacatcccttgggcgtggcag

SEQ ID NO: 4503 - RNA, 116 nt, synthetic construct
  misc_feature 1..116: note = Description of Artificial Sequence: Synthetic polynucleotide
  source 1..116: mol_type = other RNA
ttggtgactgccacgcccaagttttagagctagaaatagcaagttaaaataaggctagtccgttatcaacttgaaaaagtggcaccgagtcggtgcgaacatcccttgggcgtggc

SEQ ID NO: 4504 - RNA, 116 nt, synthetic construct
  misc_feature 1..116: note = Description of Artificial Sequence: Synthetic polynucleotide
  source 1..116: mol_type = other RNA
ttggtgactgccacgcccaagttttagagctagaaatagcaagttaaaataaggctagtccgttatcaacttgaaaaagtggcaccgagtcggtgcgaacaccccttgggcgtggc

SEQ ID NO: 4505 - RNA, 116 nt, synthetic construct
  misc_feature 1..116: note = Description of Artificial Sequence: Synthetic polynucleotide
  source 1..116: mol_type = other RNA
ttggtgactgccacgcccaagttttagagctagaaatagcaagttaaaataaggctagtccgttatcaacttgaaaaagtggcaccgagtcggtgcaacatcccttgggcgtggca

SEQ ID NO: 4506 - RNA, 116 nt, synthetic construct
  misc_feature 1..116: note = Description of Artificial Sequence: Synthetic polynucleotide
  source 1..116: mol_type = other RNA
ttggtgactgccacgcccaagttttagagctagaaatagcaagttaaaataaggctagtccgttatcaacttgaaaaagtggcaccgagtcggtgctgaacaccccttgggcgtgg

SEQ ID NO: 4507 - RNA, 116 nt, synthetic construct
  misc_feature 1..116: note = Description of Artificial Sequence: Synthetic polynucleotide
  source 1..116: mol_type = other RNA
ttggtgactgccacgcccaagttttagagctagaaatagcaagttaaaataaggctagtccgttatcaacttgaaaaagtggcaccgagtcggtgcacaccccttgggcgtggcag

SEQ ID NO: 4508 - RNA, 116 nt, synthetic construct
  misc_feature 1..116: note = Description of Artificial Sequence: Synthetic polynucleotide
  source 1..116: mol_type = other RNA
ttggtgactgccacgcccaagttttagagctagaaatagcaagttaaaataaggctagtccgttatcaacttgaaaaagtggcaccgagtcggtgcaacaccccttgggcgtggca

SEQ ID NO: 4509 - RNA, 117 nt, synthetic construct
  misc_feature 1..117: note = Description of Artificial Sequence: Synthetic polynucleotide
  source 1..117: mol_type = other RNA
ttggtgactgccacgcccaagttttagagctagaaatagcaagttaaaataaggctagtccgttatcaacttgaaaaagtggcaccgagtcggtgcgaacaccccttgggcgtggca

SEQ ID NO: 4510 - RNA, 117 nt, synthetic construct
  misc_feature 1..117: note = Description of Artificial Sequence: Synthetic polynucleotide
  source 1..117: mol_type = other RNA
ttggtgactgccacgcccaagttttagagctagaaatagcaagttaaaataaggctagtccgttatcaacttgaaaaagtggcaccgagtcggtgcacaccccttgggcgtggcagt

SEQ ID NO: 4511 - RNA, 117 nt, synthetic construct
  misc_feature 1..117: note = Description of Artificial Sequence: Synthetic polynucleotide
  source 1..117: mol_type = other RNA
ttggtgactgccacgcccaagttttagagctagaaatagcaagttaaaataaggctagtccgttatcaacttgaaaaagtggcaccgagtcggtgcaacatcccttgggcgtggcag

SEQ ID NO: 4512 - RNA, 117 nt, synthetic construct
  misc_feature 1..117: note = Description of Artificial Sequence: Synthetic polynucleotide
  source 1..117: mol_type = other RNA
ttggtgactgccacgcccaagttttagagctagaaatagcaagttaaaataaggctagtccgttatcaacttgaaaaagtggcaccgagtcggtgcgaacatcccttgggcgtggca

SEQ ID NO: 4513 - RNA, 117 nt, synthetic construct
  misc_feature 1..117: note = Description of Artificial Sequence: Synthetic polynucleotide
  source 1..117: mol_type = other RNA
ttggtgactgccacgcccaagttttagagctagaaatagcaagttaaaataaggctagtccgttatcaacttgaaaaagtggcaccgagtcggtgctgaacatcccttgggcgtggc

SEQ ID NO: 4514 - RNA, 117 nt, synthetic construct
  misc_feature 1..117: note = Description of Artificial Sequence: Synthetic polynucleotide
  source 1..117: mol_type = other RNA
ttggtgactgccacgcccaagttttagagctagaaatagcaagttaaaataaggctagtccgttatcaacttgaaaaagtggcaccgagtcggtgcaacaccccttgggcgtggcag

SEQ ID NO: 4515 - RNA, 117 nt, synthetic construct
  misc_feature 1..117: note = Description of Artificial Sequence: Synthetic polynucleotide
  source 1..117: mol_type = other RNA
ttggtgactgccacgcccaagttttagagctagaaatagcaagttaaaataaggctagtccgttatcaacttgaaaaagtggcaccgagtcggtgcacatcccttgggcgtggcagt

SEQ ID NO: 4516 - RNA, 117 nt, synthetic construct
  misc_feature 1..117: note = Description of Artificial Sequence: Synthetic polynucleotide
  source 1..117: mol_type = other RNA
ttggtgactgccacgcccaagttttagagctagaaatagcaagttaaaataaggctagtccgttatcaacttgaaaaagtggcaccgagtcggtgcgtgaacaccccttgggcgtgg

SEQ ID NO: 4517 - RNA, 117 nt, synthetic construct
  misc_feature 1..117: note = Description of Artificial Sequence: Synthetic polynucleotide
  source 1..117: mol_type = other RNA
ttggtgactgccacgcccaagttttagagctagaaatagcaagttaaaataaggctagtccgttatcaacttgaaaaagtggcaccgagtcggtgctgaacaccccttgggcgtggc

SEQ ID NO: 4518 - RNA, 118 nt, synthetic construct
  misc_feature 1..118: note = Description of Artificial Sequence: Synthetic polynucleotide
  source 1..118: mol_type = other RNA
ttggtgactgccacgcccaagttttagagctagaaatagcaagttaaaataaggctagtccgttatcaacttgaaaaagtggcaccgagtcggtgcagtgaacaccccttgggcgtgg

SEQ ID NO: 4519 - RNA, 118 nt, synthetic construct
  misc_feature 1..118: note = Description of Artificial Sequence: Synthetic polynucleotide
  source 1..118: mol_type = other RNA
ttggtgactgccacgcccaagttttagagctagaaatagcaagttaaaataaggctagtccgttatcaacttgaaaaagtggcaccgagtcggtgcacaccccttgggcgtggcagtc

SEQ ID NO: 4520 - RNA, 118 nt, synthetic construct
  misc_feature 1..118: note = Description of Artificial Sequence: Synthetic polynucleotide
  source 1..118: mol_type = other RNA
ttggtgactgccacgcccaagttttagagctagaaatagcaagttaaaataaggctagtccgttatcaacttgaaaaagtggcaccgagtcggtgcacatcccttgggcgtggctttt

SEQ ID NO: 4521 - RNA, 118 nt, synthetic construct
  misc_feature 1..118: note = Description of Artificial Sequence: Synthetic polynucleotide
  source 1..118: mol_type = other RNA
ttggtgactgccacgcccaagttttagagctagaaatagcaagttaaaataaggctagtccgttatcaacttgaaaaagtggcaccgagtcggtgcgaacatcccttgggcgtggcag

SEQ ID NO: 4522 - RNA, 118 nt, synthetic construct
  misc_feature 1..118: note = Description of Artificial Sequence: Synthetic polynucleotide
  source 1..118: mol_type = other RNA
ttggtgactgccacgcccaagttttagagctagaaatagcaagttaaaataaggctagtccgttatcaacttgaaaaagtggcaccgagtcggtgcgtgaacaccccttgggcgtggc

SEQ ID NO: 4523 - RNA, 118 nt, synthetic construct
  misc_feature 1..118: note = Description of Artificial Sequence: Synthetic polynucleotide
  source 1..118: mol_type = other RNA
ttggtgactgccacgcccaagttttagagctagaaatagcaagttaaaataaggctagtccgttatcaacttgaaaaagtggcaccgagtcggtgcaacatcccttgggcgtggcagt

SEQ ID NO: 4524 - RNA, 118 nt, synthetic construct
  misc_feature 1..118: note = Description of Artificial Sequence: Synthetic polynucleotide
  source 1..118: mol_type = other RNA
ttggtgactgccacgcccaagttttagagctagaaatagcaagttaaaataaggctagtccgttatcaacttgaaaaagtggcaccgagtcggtgctgaacaccccttgggcgtggca

SEQ ID NO: 4525 - RNA, 118 nt, synthetic construct
  misc_feature 1..118: note = Description of Artificial Sequence: Synthetic polynucleotide
  source 1..118: mol_type = other RNA
ttggtgactgccacgcccaagttttagagctagaaatagcaagttaaaataaggctagtccgttatcaacttgaaaaagtggcaccgagtcggtgcgtgaacatcccttgggcgtggc

SEQ ID NO: 4526 - RNA, 118 nt, synthetic construct
  misc_feature 1..118: note = Description of Artificial Sequence: Synthetic polynucleotide
  source 1..118: mol_type = other RNA
ttggtgactgccacgcccaagttttagagctagaaatagcaagttaaaataaggctagtccgttatcaacttgaaaaagtggcaccgagtcggtgctgaacatcccttgggcgtggca

SEQ ID NO: 4527 - RNA, 118 nt, synthetic construct
  misc_feature 1..118: note = Description of Artificial Sequence: Synthetic polynucleotide
  source 1..118: mol_type = other RNA
ttggtgactgccacgcccaagttttagagctagaaatagcaagttaaaataaggctagtccgttatcaacttgaaaaagtggcaccgagtcggtgcgaacaccccttgggcgtggcag

SEQ ID NO: 4528 - RNA, 118 nt, synthetic construct
  misc_feature 1..118: note = Description of Artificial Sequence: Synthetic polynucleotide
  source 1..118: mol_type = other RNA
ttggtgactgccacgcccaagttttagagctagaaatagcaagttaaaataaggctagtccgttatcaacttgaaaaagtggcaccgagtcggtgcacatcccttgggcgtggcagtc

SEQ ID NO: 4529 - RNA, 118 nt, synthetic construct
  misc_feature 1..118: note = Description of Artificial Sequence: Synthetic polynucleotide
  source 1..118: mol_type = other RNA
ttggtgactgccacgcccaagttttagagctagaaatagcaagttaaaataaggctagtccgttatcaacttgaaaaagtggcaccgagtcggtgcaacaccccttgggcgtggcagt

SEQ ID NO: 4530 - RNA, 119 nt, synthetic construct
  misc_feature 1..119: note = Description of Artificial Sequence: Synthetic polynucleotide
  source 1..119: mol_type = other RNA
ttggtgactgccacgcccaagttttagagctagaaatagcaagttaaaataaggctagtccgttatcaacttgaaaaagtggcaccgagtcggtgcagtgaacatcccttgggcgtggc

SEQ ID NO: 4531 - RNA, 119 nt, synthetic construct
  misc_feature 1..119: note = Description of Artificial Sequence: Synthetic polynucleotide
  source 1..119: mol_type = other RNA
ttggtgactgccacgcccaagttttagagctagaaatagcaagttaaaataaggctagtccgttatcaacttgaaaaagtggcaccgagtcggtgcgtgaacaccccttgggcgtggca

SEQ ID NO: 4532 - RNA, 119 nt, synthetic construct
  misc_feature 1..119: note = Description of Artificial Sequence: Synthetic polynucleotide
  source 1..119: mol_type = other RNA
ttggtgactgccacgcccaagttttagagctagaaatagcaagttaaaataaggctagtccgttatcaacttgaaaaagtggcaccgagtcggtgcacaccccttgggcgtggcagtca

SEQ ID NO: 4533 - RNA, 119 nt, synthetic construct
  misc_feature 1..119: note = Description of Artificial Sequence: Synthetic polynucleotide
  source 1..119: mol_type = other RNA
ttggtgactgccacgcccaagttttagagctagaaatagcaagttaaaataaggctagtccgttatcaacttgaaaaagtggcaccgagtcggtgctgaacaccccttgggcgtggcag

SEQ ID NO: 4534 - RNA, 119 nt, synthetic construct
  misc_feature 1..119: note = Description of Artificial Sequence: Synthetic polynucleotide
  source 1..119: mol_type = other RNA
ttggtgactgccacgcccaagttttagagctagaaatagcaagttaaaataaggctagtccgttatcaacttgaaaaagtggcaccgagtcggtgcacatcccttgggcgtggcatttt

SEQ ID NO: 4535 - RNA, 119 nt, synthetic construct
  misc_feature 1..119: note = Description of Artificial Sequence: Synthetic polynucleotide
  source 1..119: mol_type = other RNA
ttggtgactgccacgcccaagttttagagctagaaatagcaagttaaaataaggctagtccgttatcaacttgaaaaagtggcaccgagtcggtgcaacatcccttgggcgtggcagtc

SEQ ID NO: 4536 - RNA, 119 nt, synthetic construct
  misc_feature 1..119: note = Description of Artificial Sequence: Synthetic polynucleotide
  source 1..119: mol_type = other RNA
ttggtgactgccacgcccaagttttagagctagaaatagcaagttaaaataaggctagtccgttatcaacttgaaaaagtggcaccgagtcggtgcaacaccccttgggcgtggctttt

SEQ ID NO: 4537 - RNA, 119 nt, synthetic construct
  misc_feature 1..119: note = Description of Artificial Sequence: Synthetic polynucleotide
  source 1..119: mol_type = other RNA
ttggtgactgccacgcccaagttttagagctagaaatagcaagttaaaataaggctagtccgttatcaacttgaaaaagtggcaccgagtcggtgcgaacatcccttgggcgtggcagt

SEQ ID NO: 4538 - RNA, 119 nt, synthetic construct
  misc_feature 1..119: note = Description of Artificial Sequence: Synthetic polynucleotide
  source 1..119: mol_type = other RNA
ttggtgactgccacgcccaagttttagagctagaaatagcaagttaaaataaggctagtccgttatcaacttgaaaaagtggcaccgagtcggtgcgtgaacatcccttgggcgtggca

SEQ ID NO: 4539 - RNA, 119 nt, synthetic construct
  misc_feature 1..119: note = Description of Artificial Sequence: Synthetic polynucleotide
  source 1..119: mol_type = other RNA
ttggtgactgccacgcccaagttttagagctagaaatagcaagttaaaataaggctagtccgttatcaacttgaaaaagtggcaccgagtcggtgcacatcccttgggcgtggcagtca

SEQ ID NO: 4540 - RNA, 119 nt, synthetic construct
  misc_feature 1..119: note = Description of Artificial Sequence: Synthetic polynucleotide
  source 1..119: mol_type = other RNA
ttggtgactgccacgcccaagttttagagctagaaatagcaagttaaaataaggctagtccgttatcaacttgaaaaagtggcaccgagtcggtgcagtgaacaccccttgggcgtggc

SEQ ID NO: 4541 - RNA, 119 nt, synthetic construct
  misc_feature 1..119: note = Description of Artificial Sequence: Synthetic polynucleotide
  source 1..119: mol_type = other RNA
ttggtgactgccacgcccaagttttagagctagaaatagcaagttaaaataaggctagtccgttatcaacttgaaaaagtggcaccgagtcggtgcaacatcccttgggcgtggctttt

SEQ ID NO: 4542 - RNA, 119 nt, synthetic construct
  misc_feature 1..119: note = Description of Artificial Sequence: Synthetic polynucleotide
  source 1..119: mol_type = other RNA
ttggtgactgccacgcccaagttttagagctagaaatagcaagttaaaataaggctagtccgttatcaacttgaaaaagtggcaccgagtcggtgcaacaccccttgggcgtggcagtc

SEQ ID NO: 4543 - RNA, 119 nt, synthetic construct
  misc_feature 1..119: note = Description of Artificial Sequence: Synthetic polynucleotide
  source 1..119: mol_type = other RNA
ttggtgactgccacgcccaagttttagagctagaaatagcaagttaaaataaggctagtccgttatcaacttgaaaaagtggcaccgagtcggtgctgaacatcccttgggcgtggcag

SEQ ID NO: 4544 - RNA, 119 nt, synthetic construct
  misc_feature 1..119: note = Description of Artificial Sequence: Synthetic polynucleotide
  source 1..119: mol_type = other RNA
ttggtgactgccacgcccaagttttagagctagaaatagcaagttaaaataaggctagtccgttatcaacttgaaaaagtggcaccgagtcggtgcgaacaccccttgggcgtggcagt

SEQ ID NO: 4545 - RNA, 120 nt, synthetic construct
  misc_feature 1..120: note = Description of Artificial Sequence: Synthetic polynucleotide
  source 1..120: mol_type = other RNA
ttggtgactgccacgcccaagttttagagctagaaatagcaagttaaaataaggctagtccgttatcaacttgaaaaagtggcaccgagtcggtgcagtgaacaccccttgggcgtggca

SEQ ID NO: 4546 - RNA, 120 nt, synthetic construct
  misc_feature 1..120: note = Description of Artificial Sequence: Synthetic polynucleotide
  source 1..120: mol_type = other RNA
ttggtgactgccacgcccaagttttagagctagaaatagcaagttaaaataaggctagtccgttatcaacttgaaaaagtggcaccgagtcggtgcaacatcccttgggcgtggcagtca

SEQ ID NO: 4547 - RNA, 120 nt, synthetic construct
  misc_feature 1..120: note = Description of Artificial Sequence: Synthetic polynucleotide
  source 1..120: mol_type = other RNA
ttggtgactgccacgcccaagttttagagctagaaatagcaagttaaaataaggctagtccgttatcaacttgaaaaagtggcaccgagtcggtgcagtgaacatcccttgggcgtggca

SEQ ID NO: 4548 - RNA, 120 nt, synthetic construct
  misc_feature 1..120: note = Description of Artificial Sequence: Synthetic polynucleotide
  source 1..120: mol_type = other RNA
ttggtgactgccacgcccaagttttagagctagaaatagcaagttaaaataaggctagtccgttatcaacttgaaaaagtggcaccgagtcggtgcgaacatcccttgggcgtggctttt

SEQ ID NO: 4549 - RNA, 120 nt, synthetic construct
  misc_feature 1..120: note = Description of Artificial Sequence: Synthetic polynucleotide
  source 1..120: mol_type = other RNA
ttggtgactgccacgcccaagttttagagctagaaatagcaagttaaaataaggctagtccgttatcaacttgaaaaagtggcaccgagtcggtgcacatcccttgggcgtggcagtcac

SEQ ID NO: 4550 - RNA, 120 nt, synthetic construct
  misc_feature 1..120: note = Description of Artificial Sequence: Synthetic polynucleotide
  source 1..120: mol_type = other RNA
ttggtgactgccacgcccaagttttagagctagaaatagcaagttaaaataaggctagtccgttatcaacttgaaaaagtggcaccgagtcggtgcgcagtgaacaccccttgggcgtgg

SEQ ID NO: 4551 - RNA, 120 nt, synthetic construct
  misc_feature 1..120: note = Description of Artificial Sequence: Synthetic polynucleotide
  source 1..120: mol_type = other RNA
ttggtgactgccacgcccaagttttagagctagaaatagcaagttaaaataaggctagtccgttatcaacttgaaaaagtggcaccgagtcggtgcacatcccttgggcgtggcagtttt

SEQ ID NO: 4552 - RNA, 120 nt, synthetic construct
  misc_feature 1..120: note = Description of Artificial Sequence: Synthetic polynucleotide
  source 1..120: mol_type = other RNA
ttggtgactgccacgcccaagttttagagctagaaatagcaagttaaaataaggctagtccgttatcaacttgaaaaagtggcaccgagtcggtgcgaacatcccttgggcgtggcagtc

SEQ ID NO: 4553 - RNA, 120 nt, synthetic construct
  misc_feature 1..120: note = Description of Artificial Sequence: Synthetic polynucleotide
  source 1..120: mol_type = other RNA
ttggtgactgccacgcccaagttttagagctagaaatagcaagttaaaataaggctagtccgttatcaacttgaaaaagtggcaccgagtcggtgcacaccccttgggcgtggcagtcac

SEQ ID NO: 4554 - RNA, 120 nt, synthetic construct
  misc_feature 1..120: note = Description of Artificial Sequence: Synthetic polynucleotide
  source 1..120: mol_type = other RNA
ttggtgactgccacgcccaagttttagagctagaaatagcaagttaaaataaggctagtccgttatcaacttgaaaaagtggcaccgagtcggtgcaacatcccttgggcgtggcatttt

SEQ ID NO: 4555 - RNA, 120 nt, synthetic construct
  misc_feature 1..120: note = Description of Artificial Sequence: Synthetic polynucleotide
  source 1..120: mol_type = other RNA
ttggtgactgccacgcccaagttttagagctagaaatagcaagttaaaataaggctagtccgttatcaacttgaaaaagtggcaccgagtcggtgcgtgaacaccccttgggcgtggcag

SEQ ID NO: 4556 - RNA, 120 nt, synthetic construct
  misc_feature 1..120: note = Description of Artificial Sequence: Synthetic polynucleotide
  source 1..120: mol_type = other RNA
ttggtgactgccacgcccaagttttagagctagaaatagcaagttaaaataaggctagtccgttatcaacttgaaaaagtggcaccgagtcggtgctgaacaccccttgggcgtggcagt

SEQ ID NO: 4557 - RNA, 120 nt, synthetic construct
  misc_feature 1..120: note = Description of Artificial Sequence: Synthetic polynucleotide
  source 1..120: mol_type = other RNA
ttggtgactgccacgcccaagttttagagctagaaatagcaagttaaaataaggctagtccgttatcaacttgaaaaagtggcaccgagtcggtgctgaacatcccttgggcgtggcagt

SEQ ID NO: 4558 - RNA, 120 nt, synthetic construct
  misc_feature 1..120: note = Description of Artificial Sequence: Synthetic polynucleotide
  source 1..120: mol_type = other RNA
ttggtgactgccacgcccaagttttagagctagaaatagcaagttaaaataaggctagtccgttatcaacttgaaaaagtggcaccgagtcggtgcaacaccccttgggcgtggcagtca

SEQ ID NO: 4559 - RNA, 120 nt, synthetic construct
  misc_feature 1..120: note = Description of Artificial Sequence: Synthetic polynucleotide
  source 1..120: mol_type = other RNA
ttggtgactgccacgcccaagttttagagctagaaatagcaagttaaaataaggctagtccgttatcaacttgaaaaagtggcaccgagtcggtgcgaacaccccttgggcgtggcagtc

SEQ ID NO: 4560 - RNA, 120 nt, synthetic construct
  misc_feature 1..120: note = Description of Artificial Sequence: Synthetic polynucleotide
  source 1..120: mol_type = other RNA
ttggtgactgccacgcccaagttttagagctagaaatagcaagttaaaataaggctagtccgttatcaacttgaaaaagtggcaccgagtcggtgccagtgaacaccccttgggcgtggc

SEQ ID NO: 4561 - RNA, 120 nt, synthetic construct
  misc_feature 1..120: note = Description of Artificial Sequence: Synthetic polynucleotide
  source 1..120: mol_type = other RNA
ttggtgactgccacgcccaagttttagagctagaaatagcaagttaaaataaggctagtccgttatcaacttgaaaaagtggcaccgagtcggtgcgtgaacatcccttgggcgtggcag

SEQ ID NO: 4562 - RNA, 121 nt, synthetic construct
  misc_feature 1..121: note = Description of Artificial Sequence: Synthetic polynucleotide
  source 1..121: mol_type = other RNA
ttggtgactgccacgcccaagttttagagctagaaatagcaagttaaaataaggctagtccgttatcaacttgaaaaagtggcaccgagtcggtgcaacaccccttgggcgtggcagtcac

SEQ ID NO: 4563 - RNA, 121 nt, synthetic construct
  misc_feature 1..121: note = Description of Artificial Sequence: Synthetic polynucleotide
  source 1..121: mol_type = other RNA
ttggtgactgccacgcccaagttttagagctagaaatagcaagttaaaataaggctagtccgttatcaacttgaaaaagtggcaccgagtcggtgcaacatcccttgggcgtggcagtttt

SEQ ID NO: 4564 - RNA, 121 nt, synthetic construct
  misc_feature 1..121: note = Description of Artificial Sequence: Synthetic polynucleotide
  source 1..121: mol_type = other RNA
ttggtgactgccacgcccaagttttagagctagaaatagcaagttaaaataaggctagtccgttatcaacttgaaaaagtggcaccgagtcggtgcagtgaacaccccttgggcgtggcag

SEQ ID NO: 4565 - RNA, 121 nt, synthetic construct
  misc_feature 1..121: note = Description of Artificial Sequence: Synthetic polynucleotide
  source 1..121: mol_type = other RNA
ttggtgactgccacgcccaagttttagagctagaaatagcaagttaaaataaggctagtccgttatcaacttgaaaaagtggcaccgagtcggtgcgaacatcccttgggcgtggcatttt

SEQ ID NO: 4566 - RNA, 121 nt, synthetic construct
  misc_feature 1..121: note = Description of Artificial Sequence: Synthetic polynucleotide
  source 1..121: mol_type = other RNA
ttggtgactgccacgcccaagttttagagctagaaatagcaagttaaaataaggctagtccgttatcaacttgaaaaagtggcaccgagtcggtgcagcagtgaacaccccttgggcgtgg

SEQ ID NO: 4567 - RNA, 121 nt, synthetic construct
  misc_feature 1..121: note = Description of Artificial Sequence: Synthetic polynucleotide
  source 1..121: mol_type = other RNA
ttggtgactgccacgcccaagttttagagctagaaatagcaagttaaaataaggctagtccgttatcaacttgaaaaagtggcaccgagtcggtgcgtgaacatcccttgggcgtggcagt

SEQ ID NO: 4568 - RNA, 121 nt, synthetic construct
  misc_feature 1..121: note = Description of Artificial Sequence: Synthetic polynucleotide
  source 1..121: mol_type = other RNA
ttggtgactgccacgcccaagttttagagctagaaatagcaagttaaaataaggctagtccgttatcaacttgaaaaagtggcaccgagtcggtgcgcagtgaacatcccttgggcgtggc

SEQ ID NO: 4569 - RNA, 121 nt, synthetic construct
  misc_feature 1..121: note = Description of Artificial Sequence: Synthetic polynucleotide
  source 1..121: mol_type = other RNA
gttggtgactgccacgcccaagttttagagctagaaatagcaagttaaaataaggctagtccgttatcaacttgaaaaagtggcaccgagtcggtgcacaccccttgggcgtggttttttt

SEQ ID NO: 4570 - RNA, 121 nt, synthetic construct
  misc_feature 1..121: note = Description of Artificial Sequence: Synthetic polynucleotide
  source 1..121: mol_type = other RNA
ttggtgactgccacgcccaagttttagagctagaaatagcaagttaaaataaggctagtccgttatcaacttgaaaaagtggcaccgagtcggtgctgaacatcccttgggcgtggcagtc

SEQ ID NO: 4571 - RNA, 121 nt, synthetic construct
  misc_feature 1..121: note = Description of Artificial Sequence: Synthetic polynucleotide
  source 1..121: mol_type = other RNA
ttggtgactgccacgcccaagttttagagctagaaatagcaagttaaaataaggctagtccgttatcaacttgaaaaagtggcaccgagtcggtgctgaacatcccttgggcgtggctttt

SEQ ID NO: 4572 - RNA, 121 nt, synthetic construct
  misc_feature 1..121: note = Description of Artificial Sequence: Synthetic polynucleotide
  source 1..121: mol_type = other RNA
ttggtgactgccacgcccaagttttagagctagaaatagcaagttaaaataaggctagtccgttatcaacttgaaaaagtggcaccgagtcggtgcacatcccttgggcgtggcagttttt

SEQ ID NO: 4573 - RNA, 121 nt, synthetic construct
  misc_feature 1..121: note = Description of Artificial Sequence: Synthetic polynucleotide
  source 1..121: mol_type = other RNA
ttggtgactgccacgcccaagttttagagctagaaatagcaagttaaaataaggctagtccgttatcaacttgaaaaagtggcaccgagtcggtgcgaacatcccttgggcgtggcagtca

SEQ ID NO: 4574 - RNA, 121 nt, synthetic construct
  misc_feature 1..121: note = Description of Artificial Sequence: Synthetic polynucleotide
  source 1..121: mol_type = other RNA
ttggtgactgccacgcccaagttttagagctagaaatagcaagttaaaataaggctagtccgttatcaacttgaaaaagtggcaccgagtcggtgcaacatcccttgggcgtggcagtcac

SEQ ID NO: 4575 - RNA, 121 nt, synthetic construct
  misc_feature 1..121: note = Description of Artificial Sequence: Synthetic polynucleotide
  source 1..121: mol_type = other RNA
ttggtgactgccacgcccaagttttagagctagaaatagcaagttaaaataaggctagtccgttatcaacttgaaaaagtggcaccgagtcggtgcacaccccttgggcgtggcagtcacc

SEQ ID NO: 4576 - RNA, 121 nt, synthetic construct
  misc_feature 1..121: note = Description of Artificial Sequence: Synthetic polynucleotide
  source 1..121: mol_type = other RNA
ttggtgactgccacgcccaagttttagagctagaaatagcaagttaaaataaggctagtccgttatcaacttgaaaaagtggcaccgagtcggtgctgaacaccccttgggcgtggcagtc

SEQ ID NO: 4577 - RNA, 121 nt, synthetic construct
  misc_feature 1..121: note = Description of Artificial Sequence: Synthetic polynucleotide
  source 1..121: mol_type = other RNA
ttggtgactgccacgcccaagttttagagctagaaatagcaagttaaaataaggctagtccgttatcaacttgaaaaagtggcaccgagtcggtgcgaacaccccttgggcgtggcagtca

SEQ ID NO: 4578 - RNA, 121 nt, synthetic construct
  misc_feature 1..121: note = Description of Artificial Sequence: Synthetic polynucleotide
  source 1..121: mol_type = other RNA
ttggtgactgccacgcccaagttttagagctagaaatagcaagttaaaataaggctagtccgttatcaacttgaaaaagtggcaccgagtcggtgcacatcccttgggcgtggcagtcacc

SEQ ID NO: 4579 - RNA, 121 nt, synthetic construct
  misc_feature 1..121: note = Description of Artificial Sequence: Synthetic polynucleotide
  source 1..121: mol_type = other RNA
ttggtgactgccacgcccaagttttagagctagaaatagcaagttaaaataaggctagtccgttatcaacttgaaaaagtggcaccgagtcggtgcgtgaacaccccttgggcgtggcagt

SEQ ID NO: 4580 - RNA, 121 nt, synthetic construct
  misc_feature 1..121: note = Description of Artificial Sequence: Synthetic polynucleotide
  source 1..121: mol_type = other RNA
ttggtgactgccacgcccaagttttagagctagaaatagcaagttaaaataaggctagtccgttatcaacttgaaaaagtggcaccgagtcggtgcgcagtgaacaccccttgggcgtggc

SEQ ID NO: 4581 - RNA, 121 nt, synthetic construct
  misc_feature 1..121: note = Description of Artificial Sequence: Synthetic polynucleotide
  source 1..121: mol_type = other RNA
ttggtgactgccacgcccaagttttagagctagaaatagcaagttaaaataaggctagtccgttatcaacttgaaaaagtggcaccgagtcggtgcagtgaacatcccttgggcgtggcag

SEQ ID NO: 4582 - RNA, 122 nt, synthetic construct
  misc_feature 1..122: note = Description of Artificial Sequence: Synthetic polynucleotide
  source 1..122: mol_type = other RNA
ttggtgactgccacgcccaagttttagagctagaaatagcaagttaaaataaggctagtccgttatcaacttgaaaaagtggcaccgagtcggtgcgaacatcccttgggcgtggcagtcac

SEQ ID NO: 4583 - RNA, 122 nt, synthetic construct
  misc_feature 1..122: note = Description of Artificial Sequence: Synthetic polynucleotide
  source 1..122: mol_type = other RNA
ttggtgactgccacgcccaagttttagagctagaaatagcaagttaaaataaggctagtccgttatcaacttgaaaaagtggcaccgagtcggtgcgcagtgaacatcccttgggcgtggca

SEQ ID NO: 4584 - RNA, 122 nt, synthetic construct
  misc_feature 1..122: note = Description of Artificial Sequence: Synthetic polynucleotide
  source 1..122: mol_type = other RNA
ttggtgactgccacgcccaagttttagagctagaaatagcaagttaaaataaggctagtccgttatcaacttgaaaaagtggcaccgagtcggtgcagtgaacatcccttgggcgtggcagt

SEQ ID NO: 4585 - RNA, 122 nt, synthetic construct
  misc_feature 1..122: note = Description of Artificial Sequence: Synthetic polynucleotide
  source 1..122: mol_type = other RNA
ttggtgactgccacgcccaagttttagagctagaaatagcaagttaaaataaggctagtccgttatcaacttgaaaaagtggcaccgagtcggtgctgaacatcccttgggcgtggcagtca

SEQ ID NO: 4586 - RNA, 122 nt, synthetic construct
  misc_feature 1..122: note = Description of Artificial Sequence: Synthetic polynucleotide
  source 1..122: mol_type = other RNA
ttggtgactgccacgcccaagttttagagctagaaatagcaagttaaaataaggctagtccgttatcaacttgaaaaagtggcaccgagtcggtgcacaccccttgggcgtggcagtcacca

SEQ ID NO: 4587 - RNA, 122 nt, synthetic construct
  misc_feature 1..122: note = Description of Artificial Sequence: Synthetic polynucleotide
  source 1..122: mol_type = other RNA
ttggtgactgccacgcccaagttttagagctagaaatagcaagttaaaataaggctagtccgttatcaacttgaaaaagtggcaccgagtcggtgcacatcccttgggcgtggcagtcacca

SEQ ID NO: 4588 - RNA, 122 nt, synthetic construct
  misc_feature 1..122: note = Description of Artificial Sequence: Synthetic polynucleotide
  source 1..122: mol_type = other RNA
ttggtgactgccacgcccaagttttagagctagaaatagcaagttaaaataaggctagtccgttatcaacttgaaaaagtggcaccgagtcggtgcgtgaacaccccttgggcgtggcagtc

SEQ ID NO: 4589 - RNA, 122 nt, synthetic construct
  misc_feature 1..122: note = Description of Artificial Sequence: Synthetic polynucleotide
  source 1..122: mol_type = other RNA
ttggtgactgccacgcccaagttttagagctagaaatagcaagttaaaataaggctagtccgttatcaacttgaaaaagtggcaccgagtcggtgcagtgaacaccccttgggcgtggcagt

SEQ ID NO: 4590 - RNA, 122 nt, synthetic construct
  misc_feature 1..122: note = Description of Artificial Sequence: Synthetic polynucleotide
  source 1..122: mol_type = other RNA
ttggtgactgccacgcccaagttttagagctagaaatagcaagttaaaataaggctagtccgttatcaacttgaaaaagtggcaccgagtcggtgctgaacatcccttgggcgtggcatttt

SEQ ID NO: 4591 - RNA, 122 nt, synthetic construct
  misc_feature 1..122: note = Description of Artificial Sequence: Synthetic polynucleotide
  source 1..122: mol_type = other RNA
ttggtgactgccacgcccaagttttagagctagaaatagcaagttaaaataaggctagtccgttatcaacttgaaaaagtggcaccgagtcggtgcagcagtgaacaccccttgggcgtggc

SEQ ID NO: 4592 - RNA, 122 nt, synthetic construct
  misc_feature 1..122: note = Description of Artificial Sequence: Synthetic polynucleotide
  source 1..122: mol_type = other RNA
ttggtgactgccacgcccaagttttagagctagaaatagcaagttaaaataaggctagtccgttatcaacttgaaaaagtggcaccgagtcggtgcgaacaccccttgggcgtggcagtcac

SEQ ID NO: 4593 - RNA, 122 nt, synthetic construct
  misc_feature 1..122: note = Description of Artificial Sequence: Synthetic polynucleotide
  source 1..122: mol_type = other RNA
ttggtgactgccacgcccaagttttagagctagaaatagcaagttaaaataaggctagtccgttatcaacttgaaaaagtggcaccgagtcggtgcacatcccttgggcgtggcagtctttt

SEQ ID NO: 4594 - RNA, 122 nt, synthetic construct
  misc_feature 1..122: note = Description of Artificial Sequence: Synthetic polynucleotide
  source 1..122: mol_type = other RNA
ttggtgactgccacgcccaagttttagagctagaaatagcaagttaaaataaggctagtccgttatcaacttgaaaaagtggcaccgagtcggtgcaacatcccttgggcgtggcagttttt

SEQ ID NO: 4595 - RNA, 122 nt, synthetic construct
  misc_feature 1..122: note = Description of Artificial Sequence: Synthetic polynucleotide
  source 1..122: mol_type = other RNA
ttggtgactgccacgcccaagttttagagctagaaatagcaagttaaaataaggctagtccgttatcaacttgaaaaagtggcaccgagtcggtgcaacaccccttgggcgtggcagtcacc

SEQ ID NO: 4596 - RNA, 122 nt, synthetic construct
  misc_feature 1..122: note = Description of Artificial Sequence: Synthetic polynucleotide
  source 1..122: mol_type = other RNA
ttggtgactgccacgcccaagttttagagctagaaatagcaagttaaaataaggctagtccgttatcaacttgaaaaagtggcaccgagtcggtgcgtgaacatcccttgggcgtggcagtc

SEQ ID NO: 4597 - RNA, 122 nt, synthetic construct
  misc_feature 1..122: note = Description of Artificial Sequence: Synthetic polynucleotide
  source 1..122: mol_type = other RNA
ttggtgactgccacgcccaagttttagagctagaaatagcaagttaaaataaggctagtccgttatcaacttgaaaaagtggcaccgagtcggtgcagcagtgaacatcccttgggcgtggc

SEQ ID NO: 4598 - RNA, 122 nt, synthetic construct
  misc_feature 1..122: note = Description of Artificial Sequence: Synthetic polynucleotide
  source 1..122: mol_type = other RNA
gttggtgactgccacgcccaagttttagagctagaaatagcaagttaaaataaggctagtccgttatcaacttgaaaaagtggcaccgagtcggtgcacaccccttgggcgtggcttttttt

SEQ ID NO: 4599 - RNA, 122 nt, synthetic construct
  misc_feature 1..122: note = Description of Artificial Sequence: Synthetic polynucleotide
  source 1..122: mol_type = other RNA
gttggtgactgccacgcccaagttttagagctagaaatagcaagttaaaataaggctagtccgttatcaacttgaaaaagtggcaccgagtcggtgcaacaccccttgggcgtggttttttt

SEQ ID NO: 4600 - RNA, 122 nt, synthetic construct
  misc_feature 1..122: note = Description of Artificial Sequence: Synthetic polynucleotide
  source 1..122: mol_type = other RNA
gttggtgactgccacgcccaagttttagagctagaaatagcaagttaaaataaggctagtccgttatcaacttgaaaaagtggcaccgagtcggtgcaacaccccttgggcgtggctttttt

SEQ ID NO: 4601 - RNA, 122 nt, synthetic construct
  misc_feature 1..122: note = Description of Artificial Sequence: Synthetic polynucleotide
  source 1..122: mol_type = other RNA
ttggtgactgccacgcccaagttttagagctagaaatagcaagttaaaataaggctagtccgttatcaacttgaaaaagtggcaccgagtcggtgcgtgaacatcccttgggcgtggctttt

SEQ ID NO: 4602 - RNA, 122 nt, synthetic construct
  misc_feature 1..122: note = Description of Artificial Sequence: Synthetic polynucleotide
  source 1..122: mol_type = other RNA
ttggtgactgccacgcccaagttttagagctagaaatagcaagttaaaataaggctagtccgttatcaacttgaaaaagtggcaccgagtcggtgcgaacatcccttgggcgtggcagtttt

SEQ ID NO: 4603 - RNA, 122 nt, synthetic construct
  misc_feature 1..122: note = Description of Artificial Sequence: Synthetic polynucleotide
  source 1..122: mol_type = other RNA
ttggtgactgccacgcccaagttttagagctagaaatagcaagttaaaataaggctagtccgttatcaacttgaaaaagtggcaccgagtcggtgcgcagtgaacaccccttgggcgtggca

SEQ ID NO: 4604 - RNA, 122 nt, synthetic construct
  misc_feature 1..122: note = Description of Artificial Sequence: Synthetic polynucleotide
  source 1..122: mol_type = other RNA
ttggtgactgccacgcccaagttttagagctagaaatagcaagttaaaataaggctagtccgttatcaacttgaaaaagtggcaccgagtcggtgcaacatcccttgggcgtggcagtcacc

SEQ ID NO: 4605 - RNA, 122 nt, synthetic construct
  misc_feature 1..122: note = Description of Artificial Sequence: Synthetic polynucleotide
  source 1..122: mol_type = other RNA
ttggtgactgccacgcccaagttttagagctagaaatagcaagttaaaataaggctagtccgttatcaacttgaaaaagtggcaccgagtcggtgctgaacaccccttgggcgtggcagtca

SEQ ID NO: 4606 - RNA, 123 nt, synthetic construct
  misc_feature 1..123: note = Description of Artificial Sequence: Synthetic polynucleotide
  source 1..123: mol_type = other RNA
ttggtgactgccacgcccaagttttagagctagaaatagcaagttaaaataaggctagtccgttatcaacttgaaaaagtggcaccgagtcggtgcaacatcccttgggcgtggcagtcacca

SEQ ID NO: 4607 - RNA, 123 nt, synthetic construct
  misc_feature 1..123: note = Description of Artificial Sequence: Synthetic polynucleotide
  source 1..123: mol_type = other RNA
gttggtgactgccacgcccaagttttagagctagaaatagcaagttaaaataaggctagtccgttatcaacttgaaaaagtggcaccgagtcggtgcgaacaccccttgggcgtggttttttt

SEQ ID NO: 4608 - RNA, 123 nt, synthetic construct
  misc_feature 1..123: note = Description of Artificial Sequence: Synthetic polynucleotide
  source 1..123: mol_type = other RNA
ttggtgactgccacgcccaagttttagagctagaaatagcaagttaaaataaggctagtccgttatcaacttgaaaaagtggcaccgagtcggtgcacatcccttgggcgtggcagtcatttt

SEQ ID NO: 4609 - RNA, 123 nt, synthetic construct
  misc_feature 1..123: note = Description of Artificial Sequence: Synthetic polynucleotide
  source 1..123: mol_type = other RNA
ttggtgactgccacgcccaagttttagagctagaaatagcaagttaaaataaggctagtccgttatcaacttgaaaaagtggcaccgagtcggtgcgtgaacatcccttgggcgtggcatttt

SEQ ID NO: 4610 - RNA, 123 nt, synthetic construct
  misc_feature 1..123: note = Description of Artificial Sequence: Synthetic polynucleotide
  source 1..123: mol_type = other RNA
ttggtgactgccacgcccaagttttagagctagaaatagcaagttaaaataaggctagtccgttatcaacttgaaaaagtggcaccgagtcggtgcgaacatcccttgggcgtggcagttttt

SEQ ID NO: 4611 - RNA, 123 nt, synthetic construct
  misc_feature 1..123: note = Description of Artificial Sequence: Synthetic polynucleotide
  source 1..123: mol_type = other RNA
ttggtgactgccacgcccaagttttagagctagaaatagcaagttaaaataaggctagtccgttatcaacttgaaaaagtggcaccgagtcggtgctgaacatcccttgggcgtggcagtttt

SEQ ID NO: 4612 - RNA, 123 nt, synthetic construct
  misc_feature 1..123: note = Description of Artificial Sequence: Synthetic polynucleotide
  source 1..123: mol_type = other RNA
ttggtgactgccacgcccaagttttagagctagaaatagcaagttaaaataaggctagtccgttatcaacttgaaaaagtggcaccgagtcggtgcgcagtgaacaccccttgggcgtggcag

SEQ ID NO: 4613 - RNA, 123 nt, synthetic construct
  misc_feature 1..123: note = Description of Artificial Sequence: Synthetic polynucleotide
  source 1..123: mol_type = other RNA
ttggtgactgccacgcccaagttttagagctagaaatagcaagttaaaataaggctagtccgttatcaacttgaaaaagtggcaccgagtcggtgctgaacaccccttgggcgtggcagtttt

SEQ ID NO: 4614 - RNA, 123 nt, synthetic construct
  misc_feature 1..123: note = Description of Artificial Sequence: Synthetic polynucleotide
  source 1..123: mol_type = other RNA
ttggtgactgccacgcccaagttttagagctagaaatagcaagttaaaataaggctagtccgttatcaacttgaaaaagtggcaccgagtcggtgcacaccccttgggcgtggcagtcaccaa

SEQ ID NO: 4615 - RNA, 123 nt, synthetic construct
  misc_feature 1..123: note = Description of Artificial Sequence: Synthetic polynucleotide
  source 1..123: mol_type = other RNA
gttggtgactgccacgcccaagttttagagctagaaatagcaagttaaaataaggctagtccgttatcaacttgaaaaagtggcaccgagtcggtgcacaccccttgggcgtggcattttttt

SEQ ID NO: 4616 - RNA, 123 nt, synthetic construct
  misc_feature 1..123: note = Description of Artificial Sequence: Synthetic polynucleotide
  source 1..123: mol_type = other RNA
gttggtgactgccacgcccaagttttagagctagaaatagcaagttaaaataaggctagtccgttatcaacttgaaaaagtggcaccgagtcggtgcaacaccccttgggcgtggcttttttt

SEQ ID NO: 4617 - RNA, 123 nt, synthetic construct
  misc_feature 1..123: note = Description of Artificial Sequence: Synthetic polynucleotide
  source 1..123: mol_type = other RNA
ttggtgactgccacgcccaagttttagagctagaaatagcaagttaaaataaggctagtccgttatcaacttgaaaaagtggcaccgagtcggtgcagcagtgaacatcccttgggcgtggca

SEQ ID NO: 4618 - RNA, 123 nt, synthetic construct
  misc_feature 1..123: note = Description of Artificial Sequence: Synthetic polynucleotide
  source 1..123: mol_type = other RNA
ttggtgactgccacgcccaagttttagagctagaaatagcaagttaaaataaggctagtccgttatcaacttgaaaaagtggcaccgagtcggtgctgaacaccccttgggcgtggcagtcac

SEQ ID NO: 4619 - RNA, 123 nt, synthetic construct
  misc_feature 1..123: note = Description of Artificial Sequence: Synthetic polynucleotide
  source 1..123: mol_type = other RNA
ttggtgactgccacgcccaagttttagagctagaaatagcaagttaaaataaggctagtccgttatcaacttgaaaaagtggcaccgagtcggtgcgaacaccccttgggcgtggcagtcacc

SEQ ID NO: 4620 - RNA, 123 nt, synthetic construct
  misc_feature 1..123: note = Description of Artificial Sequence: Synthetic polynucleotide
  source 1..123: mol_type = other RNA
ttggtgactgccacgcccaagttttagagctagaaatagcaagttaaaataaggctagtccgttatcaacttgaaaaagtggcaccgagtcggtgcgaacatcccttgggcgtggcagtcacc

SEQ ID NO: 4621 - RNA, 123 nt, synthetic construct
  misc_feature 1..123: note = Description of Artificial Sequence: Synthetic polynucleotide
  source 1..123: mol_type = other RNA
ttggtgactgccacgcccaagttttagagctagaaatagcaagttaaaataaggctagtccgttatcaacttgaaaaagtggcaccgagtcggtgcagtgaacatcccttgggcgtggcagtc

SEQ ID NO: 4622 - RNA, 123 nt, synthetic construct
  misc_feature 1..123: note = Description of Artificial Sequence: Synthetic polynucleotide
  source 1..123: mol_type = other RNA
ttggtgactgccacgcccaagttttagagctagaaatagcaagttaaaataaggctagtccgttatcaacttgaaaaagtggcaccgagtcggtgcaacatcccttgggcgtggcagtctttt

SEQ ID NO: 4623 - RNA, 123 nt, synthetic construct
  misc_feature 1..123: note = Description of Artificial Sequence: Synthetic polynucleotide
  source 1..123: mol_type = other RNA
ttggtgactgccacgcccaagttttagagctagaaatagcaagttaaaataaggctagtccgttatcaacttgaaaaagtggcaccgagtcggtgcgtgaacaccccttgggcgtggcagtca

SEQ ID NO: 4624 - RNA, 123 nt, synthetic construct
  misc_feature 1..123: note = Description of Artificial Sequence: Synthetic polynucleotide
  source 1..123: mol_type = other RNA
ttggtgactgccacgcccaagttttagagctagaaatagcaagttaaaataaggctagtccgttatcaacttgaaaaagtggcaccgagtcggtgcagtgaacaccccttgggcgtggcagtc

SEQ ID NO: 4625 - RNA, 123 nt, synthetic construct
  misc_feature 1..123: note = Description of Artificial Sequence: Synthetic polynucleotide
  source 1..123: mol_type = other RNA
ttggtgactgccacgcccaagttttagagctagaaatagcaagttaaaataaggctagtccgttatcaacttgaaaaagtggcaccgagtcggtgctgaacatcccttgggcgtggcagtcac

SEQ ID NO: 4626 - RNA, 123 nt, synthetic construct
  misc_feature 1..123: note = Description of Artificial Sequence: Synthetic polynucleotide
  source 1..123: mol_type = other RNA
ttggtgactgccacgcccaagttttagagctagaaatagcaagttaaaataaggctagtccgttatcaacttgaaaaagtggcaccgagtcggtgcgcagtgaacatcccttgggcgtggcag

SEQ ID NO: 4627 - RNA, 123 nt, synthetic construct
  misc_feature 1..123: note = Description of Artificial Sequence: Synthetic polynucleotide
  source 1..123: mol_type = other RNA
ttggtgactgccacgcccaagttttagagctagaaatagcaagttaaaataaggctagtccgttatcaacttgaaaaagtggcaccgagtcggtgcagcagtgaacaccccttgggcgtggca

SEQ ID NO: 4628 - RNA, 123 nt, synthetic construct
  misc_feature 1..123: note = Description of Artificial Sequence: Synthetic polynucleotide
  source 1..123: mol_type = other RNA
gttggtgactgccacgcccaagttttagagctagaaatagcaagttaaaataaggctagtccgttatcaacttgaaaaagtggcaccgagtcggtgcacaccccttgggcgtggcagtttttt

SEQ ID NO: 4629 - RNA, 123 nt, synthetic construct
  misc_feature 1..123: note = Description of Artificial Sequence: Synthetic polynucleotide
  source 1..123: mol_type = other RNA
ttggtgactgccacgcccaagttttagagctagaaatagcaagttaaaataaggctagtccgttatcaacttgaaaaagtggcaccgagtcggtgcaacaccccttgggcgtggcagtcacca

SEQ ID NO: 4630 - RNA, 123 nt, synthetic construct
  misc_feature 1..123: note = Description of Artificial Sequence: Synthetic polynucleotide
  source 1..123: mol_type = other RNA
ttggtgactgccacgcccaagttttagagctagaaatagcaagttaaaataaggctagtccgttatcaacttgaaaaagtggcaccgagtcggtgcgtgaacatcccttgggcgtggcagtca

SEQ ID NO: 4631 - RNA, 123 nt, synthetic construct
  misc_feature 1..123: note = Description of Artificial Sequence: Synthetic polynucleotide
  source 1..123: mol_type = other RNA
ttggtgactgccacgcccaagttttagagctagaaatagcaagttaaaataaggctagtccgttatcaacttgaaaaagtggcaccgagtcggtgcagtgaacatcccttgggcgtggctttt

SEQ ID NO: 4632 - RNA, 123 nt, synthetic construct
  misc_feature 1..123: note = Description of Artificial Sequence: Synthetic polynucleotide
  source 1..123: mol_type = other RNA
ttggtgactgccacgcccaagttttagagctagaaatagcaagttaaaataaggctagtccgttatcaacttgaaaaagtggcaccgagtcggtgcacatcccttgggcgtggcagtcaccaa

SEQ ID NO: 4633 - RNA, 123 nt, synthetic construct
  misc_feature 1..123: note = Description of Artificial Sequence: Synthetic polynucleotide
  source 1..123: mol_type = other RNA
gttggtgactgccacgcccaagttttagagctagaaatagcaagttaaaataaggctagtccgttatcaacttgaaaaagtggcaccgagtcggtgcgaacaccccttgggcgtggctttttt

SEQ ID NO: 4634 - RNA, 124 nt, synthetic construct
  misc_feature 1..124: note = Description of Artificial Sequence: Synthetic polynucleotide
  source 1..124: mol_type = other RNA
ttggtgactgccacgcccaagttttagagctagaaatagcaagttaaaataaggctagtccgttatcaacttgaaaaagtggcaccgagtcggtgcgcagtgaacaccccttgggcgtggcagt

SEQ ID NO: 4635 - RNA, 124 nt, synthetic construct
  misc_feature 1..124: note = Description of Artificial Sequence: Synthetic polynucleotide
  source 1..124: mol_type = other RNA
ttggtgactgccacgcccaagttttagagctagaaatagcaagttaaaataaggctagtccgttatcaacttgaaaaagtggcaccgagtcggtgcccagcagtgaacaccccttgggcgtggc

SEQ ID NO: 4636 - RNA, 124 nt, synthetic construct
  misc_feature 1..124: note = Description of Artificial Sequence: Synthetic polynucleotide
  source 1..124: mol_type = other RNA
ttggtgactgccacgcccaagttttagagctagaaatagcaagttaaaataaggctagtccgttatcaacttgaaaaagtggcaccgagtcggtgcacatcccttgggcgtggcagtcactttt

SEQ ID NO: 4637 - RNA, 124 nt, synthetic construct
  misc_feature 1..124: note = Description of Artificial Sequence: Synthetic polynucleotide
  source 1..124: mol_type = other RNA
ttggtgactgccacgcccaagttttagagctagaaatagcaagttaaaataaggctagtccgttatcaacttgaaaaagtggcaccgagtcggtgccagtgaacaccccttgggcgtggcagtc

SEQ ID NO: 4638 - RNA, 124 nt, synthetic construct
  misc_feature 1..124: note = Description of Artificial Sequence: Synthetic polynucleotide
  source 1..124: mol_type = other RNA
ttggtgactgccacgcccaagttttagagctagaaatagcaagttaaaataaggctagtccgttatcaacttgaaaaagtggcaccgagtcggtgctgaacaccccttgggcgtggcagtcacc

SEQ ID NO: 4639 - RNA, 124 nt, synthetic construct
  misc_feature 1..124: note = Description of Artificial Sequence: Synthetic polynucleotide
  source 1..124: mol_type = other RNA
ttggtgactgccacgcccaagttttagagctagaaatagcaagttaaaataaggctagtccgttatcaacttgaaaaagtggcaccgagtcggtgcgcagtgaacatcccttgggcgtggcagt

SEQ ID NO: 4640 - RNA, 124 nt, synthetic construct
  misc_feature 1..124: note = Description of Artificial Sequence: Synthetic polynucleotide
  source 1..124: mol_type = other RNA
ttggtgactgccacgcccaagttttagagctagaaatagcaagttaaaataaggctagtccgttatcaacttgaaaaagtggcaccgagtcggtgcgtgaacaccccttgggcgtggcagtcac

SEQ ID NO: 4641 - RNA, 124 nt, synthetic construct
  misc_feature 1..124: note = Description of Artificial Sequence: Synthetic polynucleotide
  source 1..124: mol_type = other RNA
ttggtgactgccacgcccaagttttagagctagaaatagcaagttaaaataaggctagtccgttatcaacttgaaaaagtggcaccgagtcggtgcagtgaacatcccttgggcgtggcatttt

SEQ ID NO: 4642 - RNA, 124 nt, synthetic construct
  misc_feature 1..124: note = Description of Artificial Sequence: Synthetic polynucleotide
  source 1..124: mol_type = other RNA
gttggtgactgccacgcccaagttttagagctagaaatagcaagttaaaataaggctagtccgttatcaacttgaaaaagtggcaccgagtcggtgcacaccccttgggcgtggcagttttttt

SEQ ID NO: 4643 - RNA, 124 nt, synthetic construct
  misc_feature 1..124: note = Description of Artificial Sequence: Synthetic polynucleotide
  source 1..124: mol_type = other RNA
ttggtgactgccacgcccaagttttagagctagaaatagcaagttaaaataaggctagtccgttatcaacttgaaaaagtggcaccgagtcggtgctgaacatcccttgggcgtggcagttttt

SEQ ID NO: 4644 - RNA, 124 nt, synthetic construct
  misc_feature 1..124: note = Description of Artificial Sequence: Synthetic polynucleotide
  source 1..124: mol_type = other RNA
ttggtgactgccacgcccaagttttagagctagaaatagcaagttaaaataaggctagtccgttatcaacttgaaaaagtggcaccgagtcggtgcgaacatcccttgggcgtggcagtctttt

SEQ ID NO: 4645 - RNA, 124 nt, synthetic construct
  misc_feature 1..124: note = Description of Artificial Sequence: Synthetic polynucleotide
  source 1..124: mol_type = other RNA
gttggtgactgccacgcccaagttttagagctagaaatagcaagttaaaataaggctagtccgttatcaacttgaaaaagtggcaccgagtcggtgcgaacaccccttgggcgtggcttttttt

SEQ ID NO: 4646 - RNA, 124 nt, synthetic construct
  misc_feature 1..124: note = Description of Artificial Sequence: Synthetic polynucleotide
  source 1..124: mol_type = other RNA
ttggtgactgccacgcccaagttttagagctagaaatagcaagttaaaataaggctagtccgttatcaacttgaaaaagtggcaccgagtcggtgcgtgaacatcccttgggcgtggcagtcac

SEQ ID NO: 4647 - RNA, 124 nt, synthetic construct
  misc_feature 1..124: note = Description of Artificial Sequence: Synthetic polynucleotide
  source 1..124: mol_type = other RNA
ttggtgactgccacgcccaagttttagagctagaaatagcaagttaaaataaggctagtccgttatcaacttgaaaaagtggcaccgagtcggtgcaacatcccttgggcgtggcagtcatttt

SEQ ID NO: 4648 - RNA, 124 nt, synthetic construct
  misc_feature 1..124: note = Description of Artificial Sequence: Synthetic polynucleotide
  source 1..124: mol_type = other RNA
ttggtgactgccacgcccaagttttagagctagaaatagcaagttaaaataaggctagtccgttatcaacttgaaaaagtggcaccgagtcggtgcgtgaacatcccttgggcgtggcagtttt

SEQ ID NO: 4649 - RNA, 124 nt, synthetic construct
  misc_feature 1..124: note = Description of Artificial Sequence: Synthetic polynucleotide
  source 1..124: mol_type = other RNA
ttggtgactgccacgcccaagttttagagctagaaatagcaagttaaaataaggctagtccgttatcaacttgaaaaagtggcaccgagtcggtgcagcagtgaacaccccttgggcgtggcag

SEQ ID NO: 4650 - RNA, 124 nt, synthetic construct
  misc_feature 1..124: note = Description of Artificial Sequence: Synthetic polynucleotide
  source 1..124: mol_type = other RNA
gttggtgactgccacgcccaagttttagagctagaaatagcaagttaaaataaggctagtccgttatcaacttgaaaaagtggcaccgagtcggtgctgaacaccccttgggcgtggctttttt

SEQ ID NO: 4651 - RNA, 124 nt, synthetic construct
  misc_feature 1..124: note = Description of Artificial Sequence: Synthetic polynucleotide
  source 1..124: mol_type = other RNA
ttggtgactgccacgcccaagttttagagctagaaatagcaagttaaaataaggctagtccgttatcaacttgaaaaagtggcaccgagtcggtgcagcagtgaacatcccttgggcgtggcag

SEQ ID NO: 4652 - RNA, 124 nt, synthetic construct
  misc_feature 1..124: note = Description of Artificial Sequence: Synthetic polynucleotide
  source 1..124: mol_type = other RNA
gttggtgactgccacgcccaagttttagagctagaaatagcaagttaaaataaggctagtccgttatcaacttgaaaaagtggcaccgagtcggtgctgaacaccccttgggcgtggttttttt

SEQ ID NO: 4653 - RNA, 124 nt, synthetic construct
  misc_feature 1..124: note = Description of Artificial Sequence: Synthetic polynucleotide
  source 1..124: mol_type = other RNA
ttggtgactgccacgcccaagttttagagctagaaatagcaagttaaaataaggctagtccgttatcaacttgaaaaagtggcaccgagtcggtgcgaacaccccttgggcgtggcagtcacca

SEQ ID NO: 4654 - RNA, 124 nt, synthetic construct
  misc_feature 1..124: note = Description of Artificial Sequence: Synthetic polynucleotide
  source 1..124: mol_type = other RNA
ttggtgactgccacgcccaagttttagagctagaaatagcaagttaaaataaggctagtccgttatcaacttgaaaaagtggcaccgagtcggtgcgaacatcccttgggcgtggcagtcacca

SEQ ID NO: 4655 - RNA, 124 nt, synthetic construct
  misc_feature 1..124: note = Description of Artificial Sequence: Synthetic polynucleotide
  source 1..124: mol_type = other RNA
ttggtgactgccacgcccaagttttagagctagaaatagcaagttaaaataaggctagtccgttatcaacttgaaaaagtggcaccgagtcggtgcaacaccccttgggcgtggcagtcaccaa

SEQ ID NO: 4656 - RNA, 124 nt, synthetic construct
  misc_feature 1..124: note = Description of Artificial Sequence: Synthetic polynucleotide
  source 1..124: mol_type = other RNA
ttggtgactgccacgcccaagttttagagctagaaatagcaagttaaaataaggctagtccgttatcaacttgaaaaagtggcaccgagtcggtgcaacatcccttgggcgtggcagtcaccaa

SEQ ID NO: 4657 - RNA, 124 nt, synthetic construct
  misc_feature 1..124: note = Description of Artificial Sequence: Synthetic polynucleotide
  source 1..124: mol_type = other RNA
ttggtgactgccacgcccaagttttagagctagaaatagcaagttaaaataaggctagtccgttatcaacttgaaaaagtggcaccgagtcggtgcagtgaacaccccttgggcgtggcagtca

SEQ ID NO: 4658 - RNA, 124 nt, synthetic construct
  misc_feature 1..124: note = Description of Artificial Sequence: Synthetic polynucleotide
  source 1..124: mol_type = other RNA
gttggtgactgccacgcccaagttttagagctagaaatagcaagttaaaataaggctagtccgttatcaacttgaaaaagtggcaccgagtcggtgcaacaccccttgggcgtggcattttttt

SEQ ID NO: 4659 - RNA, 124 nt, synthetic construct
  misc_feature 1..124: note = Description of Artificial Sequence: Synthetic polynucleotide
  source 1..124: mol_type = other RNA
ttggtgactgccacgcccaagttttagagctagaaatagcaagttaaaataaggctagtccgttatcaacttgaaaaagtggcaccgagtcggtgctgaacatcccttgggcgtggcagtcacc

SEQ ID NO: 4660 - RNA, 124 nt, synthetic construct
  misc_feature 1..124: note = Description of Artificial Sequence: Synthetic polynucleotide
  source 1..124: mol_type = other RNA
ttggtgactgccacgcccaagttttagagctagaaatagcaagttaaaataaggctagtccgttatcaacttgaaaaagtggcaccgagtcggtgcagtgaacatcccttgggcgtggcagtca

SEQ ID NO: 4661 - RNA, 124 nt, synthetic construct
  misc_feature 1..124: note = Description of Artificial Sequence: Synthetic polynucleotide
  source 1..124: mol_type = other RNA
ttggtgactgccacgcccaagttttagagctagaaatagcaagttaaaataaggctagtccgttatcaacttgaaaaagtggcaccgagtcggtgcgccagcagtgaacaccccttgggcgtgg

SEQ ID NO: 4662 - RNA, 125 nt, synthetic construct
  misc_feature 1..125: note = Description of Artificial Sequence: Synthetic polynucleotide
  source 1..125: mol_type = other RNA
ttggtgactgccacgcccaagttttagagctagaaatagcaagttaaaataaggctagtccgttatcaacttgaaaaagtggcaccgagtcggtgcagcagtgaacatcccttgggcgtggcagt

SEQ ID NO: 4663 - RNA, 125 nt, synthetic construct
  misc_feature 1..125: note = Description of Artificial Sequence: Synthetic polynucleotide
  source 1..125: mol_type = other RNA
gttggtgactgccacgcccaagttttagagctagaaatagcaagttaaaataaggctagtccgttatcaacttgaaaaagtggcaccgagtcggtgcaacaccccttgggcgtggcagttttttt

SEQ ID NO: 4664 - RNA, 125 nt, synthetic construct
  misc_feature 1..125: note = Description of Artificial Sequence: Synthetic polynucleotide
  source 1..125: mol_type = other RNA
gttggtgactgccacgcccaagttttagagctagaaatagcaagttaaaataaggctagtccgttatcaacttgaaaaagtggcaccgagtcggtgcacaccccttgggcgtggcagtttttttt

SEQ ID NO: 4665 - RNA, 125 nt, synthetic construct
  misc_feature 1..125: note = Description of Artificial Sequence: Synthetic polynucleotide
  source 1..125: mol_type = other RNA
gttggtgactgccacgcccaagttttagagctagaaatagcaagttaaaataaggctagtccgttatcaacttgaaaaagtggcaccgagtcggtgcacaccccttgggcgtggcagtctttttt

SEQ ID NO: 4666 - RNA, 125 nt, synthetic construct
  misc_feature 1..125: note = Description of Artificial Sequence: Synthetic polynucleotide
  source 1..125: mol_type = other RNA
ttggtgactgccacgcccaagttttagagctagaaatagcaagttaaaataaggctagtccgttatcaacttgaaaaagtggcaccgagtcggtgcggccagcagtgaacaccccttgggcgtgg

SEQ ID NO: 4667 - RNA, 125 nt, synthetic construct
  misc_feature 1..125: note = Description of Artificial Sequence: Synthetic polynucleotide
  source 1..125: mol_type = other RNA
ttggtgactgccacgcccaagttttagagctagaaatagcaagttaaaataaggctagtccgttatcaacttgaaaaagtggcaccgagtcggtgcgccagcagtgaacaccccttgggcgtggc

SEQ ID NO: 4668 - RNA, 125 nt, synthetic construct
  misc_feature 1..125: note = Description of Artificial Sequence: Synthetic polynucleotide
  source 1..125: mol_type = other RNA
ttggtgactgccacgcccaagttttagagctagaaatagcaagttaaaataaggctagtccgttatcaacttgaaaaagtggcaccgagtcggtgctgaacaccccttgggcgtggcagtcacca

SEQ ID NO: 4669 - RNA, 125 nt, synthetic construct
  misc_feature 1..125: note = Description of Artificial Sequence: Synthetic polynucleotide
  source 1..125: mol_type = other RNA
gttggtgactgccacgcccaagttttagagctagaaatagcaagttaaaataaggctagtccgttatcaacttgaaaaagtggcaccgagtcggtgcgaacaccccttgggcgtggcagtttttt

SEQ ID NO: 4670 - RNA, 125 nt, synthetic construct
  misc_feature 1..125: note = Description of Artificial Sequence: Synthetic polynucleotide
  source 1..125: mol_type = other RNA
ttggtgactgccacgcccaagttttagagctagaaatagcaagttaaaataaggctagtccgttatcaacttgaaaaagtggcaccgagtcggtgcagtgaacatcccttgggcgtggcagtcac

SEQ ID NO: 4671 - RNA, 125 nt, synthetic construct
  misc_feature 1..125: note = Description of Artificial Sequence: Synthetic polynucleotide
  source 1..125: mol_type = other RNA
gttggtgactgccacgcccaagttttagagctagaaatagcaagttaaaataaggctagtccgttatcaacttgaaaaagtggcaccgagtcggtgcgaacaccccttgggcgtggcattttttt

SEQ ID NO: 4672 - RNA, 125 nt, synthetic construct
  misc_feature 1..125: note = Description of Artificial Sequence: Synthetic polynucleotide
  source 1..125: mol_type = other RNA
ttggtgactgccacgcccaagttttagagctagaaatagcaagttaaaataaggctagtccgttatcaacttgaaaaagtggcaccgagtcggtgcaacatcccttgggcgtggcagtcactttt

SEQ ID NO: 4673 - RNA, 125 nt, synthetic construct
  misc_feature 1..125: note = Description of Artificial Sequence: Synthetic polynucleotide
  source 1..125: mol_type = other RNA
ttggtgactgccacgcccaagttttagagctagaaatagcaagttaaaataaggctagtccgttatcaacttgaaaaagtggcaccgagtcggtgctgaacatcccttgggcgtggcagtcacca

SEQ ID NO: 4674 - RNA, 125 nt, synthetic construct
  misc_feature 1..125: note = Description of Artificial Sequence: Synthetic polynucleotide
  source 1..125: mol_type = other RNA
ttggtgactgccacgcccaagttttagagctagaaatagcaagttaaaataaggctagtccgttatcaacttgaaaaagtggcaccgagtcggtgcgaacaccccttgggcgtggcagtcaccaa

SEQ ID NO: 4675 - RNA, 125 nt, synthetic construct
  misc_feature 1..125: note = Description of Artificial Sequence: Synthetic polynucleotide
  source 1..125: mol_type = other RNA
ttggtgactgccacgcccaagttttagagctagaaatagcaagttaaaataaggctagtccgttatcaacttgaaaaagtggcaccgagtcggtgcagcagtgaacaccccttgggcgtggcagt

SEQ ID NO: 4676 - RNA, 125 nt, synthetic construct
  misc_feature 1..125: note = Description of Artificial Sequence: Synthetic polynucleotide
  source 1..125: mol_type = other RNA
ttggtgactgccacgcccaagttttagagctagaaatagcaagttaaaataaggctagtccgttatcaacttgaaaaagtggcaccgagtcggtgcgcagtgaacatcccttgggcgtggcagtc

SEQ ID NO: 4677 - RNA, 125 nt, synthetic construct
  misc_feature 1..125: note = Description of Artificial Sequence: Synthetic polynucleotide
  source 1..125: mol_type = other RNA
ttggtgactgccacgcccaagttttagagctagaaatagcaagttaaaataaggctagtccgttatcaacttgaaaaagtggcaccgagtcggtgcgtgaacatcccttgggcgtggcagtcacc

SEQ ID NO: 4678 - RNA, 125 nt, synthetic construct
  misc_feature 1..125: note = Description of Artificial Sequence: Synthetic polynucleotide
  source 1..125: mol_type = other RNA
gttggtgactgccacgcccaagttttagagctagaaatagcaagttaaaataaggctagtccgttatcaacttgaaaaagtggcaccgagtcggtgcgtgaacaccccttgggcgtggctttttt

SEQ ID NO: 4679 - RNA, 125 nt, synthetic construct
  misc_feature 1..125: note = Description of Artificial Sequence: Synthetic polynucleotide
  source 1..125: mol_type = other RNA
ttggtgactgccacgcccaagttttagagctagaaatagcaagttaaaataaggctagtccgttatcaacttgaaaaagtggcaccgagtcggtgcgcagtgaacaccccttgggcgtggcagtc

SEQ ID NO: 4680 - RNA, 125 nt, synthetic construct
  misc_feature 1..125: note = Description of Artificial Sequence: Synthetic polynucleotide
  source 1..125: mol_type = other RNA
ttggtgactgccacgcccaagttttagagctagaaatagcaagttaaaataaggctagtccgttatcaacttgaaaaagtggcaccgagtcggtgcacatcccttgggcgtggcagtcacctttt

SEQ ID NO: 4681 - RNA, 125 nt, synthetic construct
  misc_feature 1..125: note = Description of Artificial Sequence: Synthetic polynucleotide
  source 1..125: mol_type = other RNA
ttggtgactgccacgcccaagttttagagctagaaatagcaagttaaaataaggctagtccgttatcaacttgaaaaagtggcaccgagtcggtgcgcagtgaacatcccttgggcgtggctttt

SEQ ID NO: 4682 - RNA, 125 nt, synthetic construct
  misc_feature 1..125: note = Description of Artificial Sequence: Synthetic polynucleotide
  source 1..125: mol_type = other RNA
ttggtgactgccacgcccaagttttagagctagaaatagcaagttaaaataaggctagtccgttatcaacttgaaaaagtggcaccgagtcggtgcgccagcagtgaacatcccttgggcgtggc

SEQ ID NO: 4683 - RNA, 125 nt, synthetic construct
  misc_feature 1..125: note = Description of Artificial Sequence: Synthetic polynucleotide
  source 1..125: mol_type = other RNA
gttggtgactgccacgcccaagttttagagctagaaatagcaagttaaaataaggctagtccgttatcaacttgaaaaagtggcaccgagtcggtgcgtgaacaccccttgggcgtggttttttt

SEQ ID NO: 4684 - RNA, 125 nt, synthetic construct
  misc_feature 1..125: note = Description of Artificial Sequence: Synthetic polynucleotide
  source 1..125: mol_type = other RNA
ttggtgactgccacgcccaagttttagagctagaaatagcaagttaaaataaggctagtccgttatcaacttgaaaaagtggcaccgagtcggtgcgtgaacaccccttgggcgtggcagtcacc

SEQ ID NO: 4685 - RNA, 125 nt, synthetic construct
  misc_feature 1..125: note = Description of Artificial Sequence: Synthetic polynucleotide
  source 1..125: mol_type = other RNA
ttggtgactgccacgcccaagttttagagctagaaatagcaagttaaaataaggctagtccgttatcaacttgaaaaagtggcaccgagtcggtgctgaacatcccttgggcgtggcagtctttt

SEQ ID NO: 4686 - RNA, 125 nt, synthetic construct
  misc_feature 1..125: note = Description of Artificial Sequence: Synthetic polynucleotide
  source 1..125: mol_type = other RNA
ttggtgactgccacgcccaagttttagagctagaaatagcaagttaaaataaggctagtccgttatcaacttgaaaaagtggcaccgagtcggtgcagtgaacatcccttgggcgtggcagtttt

SEQ ID NO: 4687 - RNA, 125 nt, synthetic construct
  misc_feature 1..125: note = Description of Artificial Sequence: Synthetic polynucleotide
  source 1..125: mol_type = other RNA
ttggtgactgccacgcccaagttttagagctagaaatagcaagttaaaataaggctagtccgttatcaacttgaaaaagtggcaccgagtcggtgcgaacatcccttgggcgtggcagtcatttt

SEQ ID NO: 4688 - RNA, 125 nt, synthetic construct
  misc_feature 1..125: note = Description of Artificial Sequence: Synthetic polynucleotide
  source 1..125: mol_type = other RNA
ttggtgactgccacgcccaagttttagagctagaaatagcaagttaaaataaggctagtccgttatcaacttgaaaaagtggcaccgagtcggtgcgtgaacatcccttgggcgtggcagttttt

SEQ ID NO: 4689 - RNA, 125 nt, synthetic construct
  misc_feature 1..125: note = Description of Artificial Sequence: Synthetic polynucleotide
  source 1..125: mol_type = other RNA
ttggtgactgccacgcccaagttttagagctagaaatagcaagttaaaataaggctagtccgttatcaacttgaaaaagtggcaccgagtcggtgcgaacatcccttgggcgtggcagtcaccaa

SEQ ID NO: 4690 - RNA, 125 nt, synthetic construct
  misc_feature 1..125: note = Description of Artificial Sequence: Synthetic polynucleotide
  source 1..125: mol_type = other RNA
gttggtgactgccacgcccaagttttagagctagaaatagcaagttaaaataaggctagtccgttatcaacttgaaaaagtggcaccgagtcggtgctgaacaccccttgggcgtggcttttttt

SEQ ID NO: 4691 - RNA, 125 nt, synthetic construct
  misc_feature 1..125: note = Description of Artificial Sequence: Synthetic polynucleotide
  source 1..125: mol_type = other RNA
ttggtgactgccacgcccaagttttagagctagaaatagcaagttaaaataaggctagtccgttatcaacttgaaaaagtggcaccgagtcggtgcagtgaacaccccttgggcgtggcagtcac

SEQ ID NO: 4692 - RNA, 126 nt, synthetic construct
  misc_feature 1..126: note = Description of Artificial Sequence: Synthetic polynucleotide
  source 1..126: mol_type = other RNA
gttggtgactgccacgcccaagttttagagctagaaatagcaagttaaaataaggctagtccgttatcaacttgaaaaagtggcaccgagtcggtgcgaacaccccttgggcgtggcagttttttt

SEQ ID NO: 4693 - RNA, 126 nt, synthetic construct
  misc_feature 1..126: note = Description of Artificial Sequence: Synthetic polynucleotide
  source 1..126: mol_type = other RNA
ttggtgactgccacgcccaagttttagagctagaaatagcaagttaaaataaggctagtccgttatcaacttgaaaaagtggcaccgagtcggtgcgtgaacatcccttgggcgtggcagtctttt

SEQ ID NO: 4694 - RNA, 126 nt, synthetic construct
  misc_feature 1..126: note = Description of Artificial Sequence: Synthetic polynucleotide
  source 1..126: mol_type = other RNA
gttggtgactgccacgcccaagttttagagctagaaatagcaagttaaaataaggctagtccgttatcaacttgaaaaagtggcaccgagtcggtgctgaacaccccttgggcgtggcattttttt

SEQ ID NO: 4695 - RNA, 126 nt, synthetic construct
  misc_feature 1..126: note = Description of Artificial Sequence: Synthetic polynucleotide
  source 1..126: mol_type = other RNA
ttggtgactgccacgcccaagttttagagctagaaatagcaagttaaaataaggctagtccgttatcaacttgaaaaagtggcaccgagtcggtgcgtgaacaccccttgggcgtggcagtctttt

SEQ ID NO: 4696 - RNA, 126 nt, synthetic construct
  misc_feature 1..126: note = Description of Artificial Sequence: Synthetic polynucleotide
  source 1..126: mol_type = other RNA
ttggtgactgccacgcccaagttttagagctagaaatagcaagttaaaataaggctagtccgttatcaacttgaaaaagtggcaccgagtcggtgcaacatcccttgggcgtggcagtcacctttt

SEQ ID NO: 4697 - RNA, 126 nt, synthetic construct
  misc_feature 1..126: note = Description of Artificial Sequence: Synthetic polynucleotide
  source 1..126: mol_type = other RNA
ttggtgactgccacgcccaagttttagagctagaaatagcaagttaaaataaggctagtccgttatcaacttgaaaaagtggcaccgagtcggtgcagcagtgaacaccccttgggcgtggcagtc

SEQ ID NO: 4698 - RNA, 126 nt, synthetic construct
  misc_feature 1..126: note = Description of Artificial Sequence: Synthetic polynucleotide
  source 1..126: mol_type = other RNA
ttggtgactgccacgcccaagttttagagctagaaatagcaagttaaaataaggctagtccgttatcaacttgaaaaagtggcaccgagtcggtgcgtgaacatcccttgggcgtggcagtcacca

SEQ ID NO: 4699 - RNA, 126 nt, synthetic construct
  misc_feature 1..126: note = Description of Artificial Sequence: Synthetic polynucleotide
  source 1..126: mol_type = other RNA
gttggtgactgccacgcccaagttttagagctagaaatagcaagttaaaataaggctagtccgttatcaacttgaaaaagtggcaccgagtcggtgcaacaccccttgggcgtggcagtttttttt

SEQ ID NO: 4700 - RNA, 126 nt, synthetic construct
  misc_feature 1..126: note = Description of Artificial Sequence: Synthetic polynucleotide
  source 1..126: mol_type = other RNA
ttggtgactgccacgcccaagttttagagctagaaatagcaagttaaaataaggctagtccgttatcaacttgaaaaagtggcaccgagtcggtgcggccagcagtgaacaccccttgggcgtggc

SEQ ID NO: 4701 - RNA, 126 nt, synthetic construct
  misc_feature 1..126: note = Description of Artificial Sequence: Synthetic polynucleotide
  source 1..126: mol_type = other RNA
gttggtgactgccacgcccaagttttagagctagaaatagcaagttaaaataaggctagtccgttatcaacttgaaaaagtggcaccgagtcggtgcagtgaacaccccttgggcgtggttttttt

SEQ ID NO: 4702 - RNA, 126 nt, synthetic construct
  misc_feature 1..126: note = Description of Artificial Sequence: Synthetic polynucleotide
  source 1..126: mol_type = other RNA
ttggtgactgccacgcccaagttttagagctagaaatagcaagttaaaataaggctagtccgttatcaacttgaaaaagtggcaccgagtcggtgcagcagtgaacatcccttgggcgtggcagtc

SEQ ID NO: 4703 - RNA, 126 nt, synthetic construct
  misc_feature 1..126: note = Description of Artificial Sequence: Synthetic polynucleotide
  source 1..126: mol_type = other RNA
ttggtgactgccacgcccaagttttagagctagaaatagcaagttaaaataaggctagtccgttatcaacttgaaaaagtggcaccgagtcggtgcagcagtgaacatcccttgggcgtggctttt

SEQ ID NO: 4704 - RNA, 126 nt, synthetic construct
  misc_feature 1..126: note = Description of Artificial Sequence: Synthetic polynucleotide
  source 1..126: mol_type = other RNA
gttggtgactgccacgcccaagttttagagctagaaatagcaagttaaaataaggctagtccgttatcaacttgaaaaagtggcaccgagtcggtgcagtgaacaccccttgggcgtggctttttt

SEQ ID NO: 4705 - RNA, 126 nt, synthetic construct
  misc_feature 1..126: note = Description of Artificial Sequence: Synthetic polynucleotide
  source 1..126: mol_type = other RNA
ttggtgactgccacgcccaagttttagagctagaaatagcaagttaaaataaggctagtccgttatcaacttgaaaaagtggcaccgagtcggtgcaggccagcagtgaacaccccttgggcgtgg

SEQ ID NO: 4706 - RNA, 126 nt, synthetic construct
  misc_feature 1..126: note = Description of Artificial Sequence: Synthetic polynucleotide
  source 1..126: mol_type = other RNA
ttggtgactgccacgcccaagttttagagctagaaatagcaagttaaaataaggctagtccgttatcaacttgaaaaagtggcaccgagtcggtgcgcagtgaacatcccttgggcgtggcatttt

SEQ ID NO: 4707 - RNA, 126 nt, synthetic construct
  misc_feature 1..126: note = Description of Artificial Sequence: Synthetic polynucleotide
  source 1..126: mol_type = other RNA
gttggtgactgccacgcccaagttttagagctagaaatagcaagttaaaataaggctagtccgttatcaacttgaaaaagtggcaccgagtcggtgcgtgaacaccccttgggcgtggcttttttt

SEQ ID NO: 4708 - RNA, 126 nt, synthetic construct
  misc_feature 1..126: note = Description of Artificial Sequence: Synthetic polynucleotide
  source 1..126: mol_type = other RNA
ttggtgactgccacgcccaagttttagagctagaaatagcaagttaaaataaggctagtccgttatcaacttgaaaaagtggcaccgagtcggtgcagtgaacatcccttgggcgtggcagttttt

SEQ ID NO: 4709 - RNA, 126 nt, synthetic construct
  misc_feature 1..126: note = Description of Artificial Sequence: Synthetic polynucleotide
  source 1..126: mol_type = other RNA
ttggtgactgccacgcccaagttttagagctagaaatagcaagttaaaataaggctagtccgttatcaacttgaaaaagtggcaccgagtcggtgcgaacatcccttgggcgtggcagtcactttt

SEQ ID NO: 4710 - RNA, 126 nt, synthetic construct
  misc_feature 1..126: note = Description of Artificial Sequence: Synthetic polynucleotide
  source 1..126: mol_type = other RNA
ttggtgactgccacgcccaagttttagagctagaaatagcaagttaaaataaggctagtccgttatcaacttgaaaaagtggcaccgagtcggtgcgccagcagtgaacaccccttgggcgtggca

SEQ ID NO: 4711 - RNA, 126 nt, synthetic construct
  misc_feature 1..126: note = Description of Artificial Sequence: Synthetic polynucleotide
  source 1..126: mol_type = other RNA
ttggtgactgccacgcccaagttttagagctagaaatagcaagttaaaataaggctagtccgttatcaacttgaaaaagtggcaccgagtcggtgctgaacatcccttgggcgtggcagtcaccaa

SEQ ID NO: 4712 - RNA, 126 nt, synthetic construct
  misc_feature 1..126: note = Description of Artificial Sequence: Synthetic polynucleotide
  source 1..126: mol_type = other RNA
ttggtgactgccacgcccaagttttagagctagaaatagcaagttaaaataaggctagtccgttatcaacttgaaaaagtggcaccgagtcggtgcacatcccttgggcgtggcagtcaccatttt

SEQ ID NO: 4713 - RNA, 126 nt, synthetic construct
  misc_feature 1..126: note = Description of Artificial Sequence: Synthetic polynucleotide
  source 1..126: mol_type = other RNA
gttggtgactgccacgcccaagttttagagctagaaatagcaagttaaaataaggctagtccgttatcaacttgaaaaagtggcaccgagtcggtgctgaacaccccttgggcgtggcagtttttt

SEQ ID NO: 4714 - RNA, 126 nt, synthetic construct
  misc_feature 1..126: note = Description of Artificial Sequence: Synthetic polynucleotide
  source 1..126: mol_type = other RNA
ttggtgactgccacgcccaagttttagagctagaaatagcaagttaaaataaggctagtccgttatcaacttgaaaaagtggcaccgagtcggtgcgcagtgaacatcccttgggcgtggcagtca

SEQ ID NO: 4715 - RNA, 126 nt, synthetic construct
  misc_feature 1..126: note = Description of Artificial Sequence: Synthetic polynucleotide
  source 1..126: mol_type = other RNA
gttggtgactgccacgcccaagttttagagctagaaatagcaagttaaaataaggctagtccgttatcaacttgaaaaagtggcaccgagtcggtgcaacaccccttgggcgtggcagtctttttt

SEQ ID NO: 4716 - RNA, 126 nt, synthetic construct
  misc_feature 1..126: note = Description of Artificial Sequence: Synthetic polynucleotide
  source 1..126: mol_type = other RNA
gttggtgactgccacgcccaagttttagagctagaaatagcaagttaaaataaggctagtccgttatcaacttgaaaaagtggcaccgagtcggtgcacaccccttgggcgtggcagtcttttttt

SEQ ID NO: 4717 - RNA, 126 nt, synthetic construct
  misc_feature 1..126: note = Description of Artificial Sequence: Synthetic polynucleotide
  source 1..126: mol_type = other RNA
ttggtgactgccacgcccaagttttagagctagaaatagcaagttaaaataaggctagtccgttatcaacttgaaaaagtggcaccgagtcggtgcagtgaacatcccttgggcgtggcagtcacc

SEQ ID NO: 4718 - RNA, 126 nt, synthetic construct
  misc_feature 1..126: note = Description of Artificial Sequence: Synthetic polynucleotide
  source 1..126: mol_type = other RNA
ttggtgactgccacgcccaagttttagagctagaaatagcaagttaaaataaggctagtccgttatcaacttgaaaaagtggcaccgagtcggtgcgccagcagtgaacatcccttgggcgtggca

SEQ ID NO: 4719 - RNA, 126 nt, synthetic construct
  misc_feature 1..126: note = Description of Artificial Sequence: Synthetic polynucleotide
  source 1..126: mol_type = other RNA
ttggtgactgccacgcccaagttttagagctagaaatagcaagttaaaataaggctagtccgttatcaacttgaaaaagtggcaccgagtcggtgcgcagtgaacaccccttgggcgtggcagtca

SEQ ID NO: 4720 - RNA, 126 nt, synthetic construct
  misc_feature 1..126: note = Description of Artificial Sequence: Synthetic polynucleotide
  source 1..126: mol_type = other RNA
ttggtgactgccacgcccaagttttagagctagaaatagcaagttaaaataaggctagtccgttatcaacttgaaaaagtggcaccgagtcggtgcagtgaacaccccttgggcgtggcagtcacc

SEQ ID NO: 4721 - RNA, 126 nt, synthetic construct
  misc_feature 1..126: note = Description of Artificial Sequence: Synthetic polynucleotide
  source 1..126: mol_type = other RNA
ttggtgactgccacgcccaagttttagagctagaaatagcaagttaaaataaggctagtccgttatcaacttgaaaaagtggcaccgagtcggtgcagtgaacaccccttgggcgtggcagttttt

SEQ ID NO: 4722 - RNA, 126 nt, synthetic construct
  misc_feature 1..126: note = Description of Artificial Sequence: Synthetic polynucleotide
  source 1..126: mol_type = other RNA
ttggtgactgccacgcccaagttttagagctagaaatagcaagttaaaataaggctagtccgttatcaacttgaaaaagtggcaccgagtcggtgctgaacaccccttgggcgtggcagtcaccaa

SEQ ID NO: 4723 - RNA, 126 nt, synthetic construct
  misc_feature 1..126: note = Description of Artificial Sequence: Synthetic polynucleotide
  source 1..126: mol_type = other RNA
ttggtgactgccacgcccaagttttagagctagaaatagcaagttaaaataaggctagtccgttatcaacttgaaaaagtggcaccgagtcggtgctgaacatcccttgggcgtggcagtcatttt

SEQ ID NO: 4724 - RNA, 126 nt, synthetic construct
  misc_feature 1..126: note = Description of Artificial Sequence: Synthetic polynucleotide
  source 1..126: mol_type = other RNA
ttggtgactgccacgcccaagttttagagctagaaatagcaagttaaaataaggctagtccgttatcaacttgaaaaagtggcaccgagtcggtgcgtgaacaccccttgggcgtggcagtcacca

SEQ ID NO: 4725 - RNA, 127 nt, synthetic construct
  misc_feature 1..127: note = Description of Artificial Sequence: Synthetic polynucleotide
  source 1..127: mol_type = other RNA
ttggtgactgccacgcccaagttttagagctagaaatagcaagttaaaataaggctagtccgttatcaacttgaaaaagtggcaccgagtcggtgcgcagtgaacatcccttgggcgtggcagtcac

SEQ ID NO: 4726 - RNA, 127 nt, synthetic construct
  misc_feature 1..127: note = Description of Artificial Sequence: Synthetic polynucleotide
  source 1..127: mol_type = other RNA
ttggtgactgccacgcccaagttttagagctagaaatagcaagttaaaataaggctagtccgttatcaacttgaaaaagtggcaccgagtcggtgcgcagtgaacaccccttgggcgtggcagtcac

SEQ ID NO: 4727 - RNA, 127 nt, synthetic construct
  misc_feature 1..127: note = Description of Artificial Sequence: Synthetic polynucleotide
  source 1..127: mol_type = other RNA
gttggtgactgccacgcccaagttttagagctagaaatagcaagttaaaataaggctagtccgttatcaacttgaaaaagtggcaccgagtcggtgctgaacaccccttgggcgtggcagttttttt

SEQ ID NO: 4728 - RNA, 127 nt, synthetic construct
  misc_feature 1..127: note = Description of Artificial Sequence: Synthetic polynucleotide
  source 1..127: mol_type = other RNA
ttggtgactgccacgcccaagttttagagctagaaatagcaagttaaaataaggctagtccgttatcaacttgaaaaagtggcaccgagtcggtgcgaacatcccttgggcgtggcagtcacctttt

SEQ ID NO: 4729 - RNA, 127 nt, synthetic construct
  misc_feature 1..127: note = Description of Artificial Sequence: Synthetic polynucleotide
  source 1..127: mol_type = other RNA
gttggtgactgccacgcccaagttttagagctagaaatagcaagttaaaataaggctagtccgttatcaacttgaaaaagtggcaccgagtcggtgcgaacaccccttgggcgtggcagtctttttt

SEQ ID NO: 4730 - RNA, 127 nt, synthetic construct
  misc_feature 1..127: note = Description of Artificial Sequence: Synthetic polynucleotide
  source 1..127: mol_type = other RNA
ttggtgactgccacgcccaagttttagagctagaaatagcaagttaaaataaggctagtccgttatcaacttgaaaaagtggcaccgagtcggtgcaacatcccttgggcgtggcagtcaccatttt

SEQ ID NO: 4731 - RNA, 127 nt, synthetic construct
  misc_feature 1..127: note = Description of Artificial Sequence: Synthetic polynucleotide
  source 1..127: mol_type = other RNA
gttggtgactgccacgcccaagttttagagctagaaatagcaagttaaaataaggctagtccgttatcaacttgaaaaagtggcaccgagtcggtgcgtgaacaccccttgggcgtggcagtttttt

SEQ ID NO: 4732 - RNA, 127 nt, synthetic construct
  misc_feature 1..127: note = Description of Artificial Sequence: Synthetic polynucleotide
  source 1..127: mol_type = other RNA
gttggtgactgccacgcccaagttttagagctagaaatagcaagttaaaataaggctagtccgttatcaacttgaaaaagtggcaccgagtcggtgcagtgaacaccccttgggcgtggcttttttt

SEQ ID NO: 4733 - RNA, 127 nt, synthetic construct
  misc_feature 1..127: note = Description of Artificial Sequence: Synthetic polynucleotide
  source 1..127: mol_type = other RNA
ttggtgactgccacgcccaagttttagagctagaaatagcaagttaaaataaggctagtccgttatcaacttgaaaaagtggcaccgagtcggtgcacatcccttgggcgtggcagtcaccaatttt

SEQ ID NO: 4734 - RNA, 127 nt, synthetic construct
  misc_feature 1..127: note = Description of Artificial Sequence: Synthetic polynucleotide
  source 1..127: mol_type = other RNA
gttggtgactgccacgcccaagttttagagctagaaatagcaagttaaaataaggctagtccgttatcaacttgaaaaagtggcaccgagtcggtgcgaacaccccttgggcgtggcagtttttttt

SEQ ID NO: 4735 - RNA, 127 nt, synthetic construct
  misc_feature 1..127: note = Description of Artificial Sequence: Synthetic polynucleotide
  source 1..127: mol_type = other RNA
ttggtgactgccacgcccaagttttagagctagaaatagcaagttaaaataaggctagtccgttatcaacttgaaaaagtggcaccgagtcggtgcgtgaacatcccttgggcgtggcagtcatttt

SEQ ID NO: 4736 - RNA, 127 nt, synthetic construct
  misc_feature 1..127: note = Description of Artificial Sequence: Synthetic polynucleotide
  source 1..127: mol_type = other RNA
ttggtgactgccacgcccaagttttagagctagaaatagcaagttaaaataaggctagtccgttatcaacttgaaaaagtggcaccgagtcggtgcagcagtgaacatcccttgggcgtggcatttt

SEQ ID NO: 4737 - RNA, 127 nt, synthetic construct
  misc_feature 1..127: note = Description of Artificial Sequence: Synthetic polynucleotide
  source 1..127: mol_type = other RNA
ttggtgactgccacgcccaagttttagagctagaaatagcaagttaaaataaggctagtccgttatcaacttgaaaaagtggcaccgagtcggtgcagtgaacatcccttgggcgtggcagtcacca

SEQ ID NO: 4738 - RNA, 127 nt, synthetic construct
  misc_feature 1..127: note = Description of Artificial Sequence: Synthetic polynucleotide
  source 1..127: mol_type = other RNA
ttggtgactgccacgcccaagttttagagctagaaatagcaagttaaaataaggctagtccgttatcaacttgaaaaagtggcaccgagtcggtgcagtgaacaccccttgggcgtggcagtcacca

SEQ ID NO: 4739 - RNA, 127 nt, synthetic construct
  misc_feature 1..127: note = Description of Artificial Sequence: Synthetic polynucleotide
  source 1..127: mol_type = other RNA
ttggtgactgccacgcccaagttttagagctagaaatagcaagttaaaataaggctagtccgttatcaacttgaaaaagtggcaccgagtcggtgcgccagcagtgaacatcccttgggcgtggcag

SEQ ID NO: 4740 - RNA, 127 nt, synthetic construct
  misc_feature 1..127: note = Description of Artificial Sequence: Synthetic polynucleotide
  source 1..127: mol_type = other RNA
ttggtgactgccacgcccaagttttagagctagaaatagcaagttaaaataaggctagtccgttatcaacttgaaaaagtggcaccgagtcggtgcagcagtgaacaccccttgggcgtggcagtca

SEQ ID NO: 4741 - RNA, 127 nt, synthetic construct
  misc_feature 1..127: note = Description of Artificial Sequence: Synthetic polynucleotide
  source 1..127: mol_type = other RNA
ttggtgactgccacgcccaagttttagagctagaaatagcaagttaaaataaggctagtccgttatcaacttgaaaaagtggcaccgagtcggtgctgaacaccccttgggcgtggcagtcactttt

SEQ ID NO: 4742 - RNA, 127 nt, synthetic construct
  misc_feature 1..127: note = Description of Artificial Sequence: Synthetic polynucleotide
  source 1..127: mol_type = other RNA
ttggtgactgccacgcccaagttttagagctagaaatagcaagttaaaataaggctagtccgttatcaacttgaaaaagtggcaccgagtcggtgcggccagcagtgaacaccccttgggcgtggca

SEQ ID NO: 4743 - RNA, 127 nt, synthetic construct
  misc_feature 1..127: note = Description of Artificial Sequence: Synthetic polynucleotide
  source 1..127: mol_type = other RNA
ttggtgactgccacgcccaagttttagagctagaaatagcaagttaaaataaggctagtccgttatcaacttgaaaaagtggcaccgagtcggtgcagtgaacaccccttgggcgtggcagtctttt

SEQ ID NO: 4744 - RNA, 127 nt, synthetic construct
  misc_feature 1..127: note = Description of Artificial Sequence: Synthetic polynucleotide
  source 1..127: mol_type = other RNA
ttggtgactgccacgcccaagttttagagctagaaatagcaagttaaaataaggctagtccgttatcaacttgaaaaagtggcaccgagtcggtgctgaacatcccttgggcgtggcagtcactttt

SEQ ID NO: 4745 - RNA, 127 nt, synthetic construct
  misc_feature 1..127: note = Description of Artificial Sequence: Synthetic polynucleotide
  source 1..127: mol_type = other RNA
gttggtgactgccacgcccaagttttagagctagaaatagcaagttaaaataaggctagtccgttatcaacttgaaaaagtggcaccgagtcggtgcacaccccttgggcgtggcagtcactttttt

SEQ ID NO: 4746 - RNA, 127 nt, synthetic construct
  misc_feature 1..127: note = Description of Artificial Sequence: Synthetic polynucleotide
  source 1..127: mol_type = other RNA
ttggtgactgccacgcccaagttttagagctagaaatagcaagttaaaataaggctagtccgttatcaacttgaaaaagtggcaccgagtcggtgcgtgaacatcccttgggcgtggcagtcaccaa

SEQ ID NO: 4747 - RNA, 127 nt, synthetic construct
  misc_feature 1..127: note = Description of Artificial Sequence: Synthetic polynucleotide
  source 1..127: mol_type = other RNA
ttggtgactgccacgcccaagttttagagctagaaatagcaagttaaaataaggctagtccgttatcaacttgaaaaagtggcaccgagtcggtgcgcagtgaacatcccttgggcgtggcagtttt

SEQ ID NO: 4748 - RNA, 127 nt, synthetic construct
  misc_feature 1..127: note = Description of Artificial Sequence: Synthetic polynucleotide
  source 1..127: mol_type = other RNA
ttggtgactgccacgcccaagttttagagctagaaatagcaagttaaaataaggctagtccgttatcaacttgaaaaagtggcaccgagtcggtgcgtgaacaccccttgggcgtggcagtcaccaa

SEQ ID NO: 4749 - RNA, 127 nt, synthetic construct
  misc_feature 1..127: note = Description of Artificial Sequence: Synthetic polynucleotide
  source 1..127: mol_type = other RNA
ttggtgactgccacgcccaagttttagagctagaaatagcaagttaaaataaggctagtccgttatcaacttgaaaaagtggcaccgagtcggtgcgaggccagcagtgaacaccccttgggcgtgg

SEQ ID NO: 4750 - RNA, 127 nt, synthetic construct
  misc_feature 1..127: note = Description of Artificial Sequence: Synthetic polynucleotide
  source 1..127: mol_type = other RNA
gttggtgactgccacgcccaagttttagagctagaaatagcaagttaaaataaggctagtccgttatcaacttgaaaaagtggcaccgagtcggtgcacaccccttgggcgtggcagtcattttttt

SEQ ID NO: 4751 - RNA, 127 nt, synthetic construct
  misc_feature 1..127: note = Description of Artificial Sequence: Synthetic polynucleotide
  source 1..127: mol_type = other RNA
ttggtgactgccacgcccaagttttagagctagaaatagcaagttaaaataaggctagtccgttatcaacttgaaaaagtggcaccgagtcggtgcagcagtgaacatcccttgggcgtggcagtca

SEQ ID NO: 4752 - RNA, 127 nt, synthetic construct
  misc_feature 1..127: note = Description of Artificial Sequence: Synthetic polynucleotide
  source 1..127: mol_type = other RNA
gttggtgactgccacgcccaagttttagagctagaaatagcaagttaaaataaggctagtccgttatcaacttgaaaaagtggcaccgagtcggtgcaacaccccttgggcgtggcagtcttttttt

SEQ ID NO: 4753 - RNA, 127 nt, synthetic construct
  misc_feature 1..127: note = Description of Artificial Sequence: Synthetic polynucleotide
  source 1..127: mol_type = other RNA
ttggtgactgccacgcccaagttttagagctagaaatagcaagttaaaataaggctagtccgttatcaacttgaaaaagtggcaccgagtcggtgcagtgaacatcccttgggcgtggcagtctttt

SEQ ID NO: 4754 - RNA, 127 nt, synthetic construct
  misc_feature 1..127: note = Description of Artificial Sequence: Synthetic polynucleotide
  source 1..127: mol_type = other RNA
gttggtgactgccacgcccaagttttagagctagaaatagcaagttaaaataaggctagtccgttatcaacttgaaaaagtggcaccgagtcggtgcgtgaacaccccttgggcgtggcattttttt

SEQ ID NO: 4755 - RNA, 127 nt, synthetic construct
  misc_feature 1..127: note = Description of Artificial Sequence: Synthetic polynucleotide
  source 1..127: mol_type = other RNA
ttggtgactgccacgcccaagttttagagctagaaatagcaagttaaaataaggctagtccgttatcaacttgaaaaagtggcaccgagtcggtgcaggccagcagtgaacaccccttgggcgtggc

SEQ ID NO: 4756 - RNA, 127 nt, synthetic construct
  misc_feature 1..127: note = Description of Artificial Sequence: Synthetic polynucleotide
  source 1..127: mol_type = other RNA
ttggtgactgccacgcccaagttttagagctagaaatagcaagttaaaataaggctagtccgttatcaacttgaaaaagtggcaccgagtcggtgcgccagcagtgaacaccccttgggcgtggcag

SEQ ID NO: 4757 - RNA, 128 nt, synthetic construct
  misc_feature 1..128: note = Description of Artificial Sequence: Synthetic polynucleotide
  source 1..128: mol_type = other RNA
gttggtgactgccacgcccaagttttagagctagaaatagcaagttaaaataaggctagtccgttatcaacttgaaaaagtggcaccgagtcggtgcgtgaacaccccttgggcgtggcagttttttt

SEQ ID NO: 4758 - RNA, 128 nt, synthetic construct
  misc_feature 1..128: note = Description of Artificial Sequence: Synthetic polynucleotide
  source 1..128: mol_type = other RNA
ttggtgactgccacgcccaagttttagagctagaaatagcaagttaaaataaggctagtccgttatcaacttgaaaaagtggcaccgagtcggtgcgcagtgaacaccccttgggcgtggcagtcacc

SEQ ID NO: 4759 - RNA, 128 nt, synthetic construct
  misc_feature 1..128: note = Description of Artificial Sequence: Synthetic polynucleotide
  source 1..128: mol_type = other RNA
ttggtgactgccacgcccaagttttagagctagaaatagcaagttaaaataaggctagtccgttatcaacttgaaaaagtggcaccgagtcggtgcgccagcagtgaacaccccttgggcgtggcagt

SEQ ID NO: 4760 - RNA, 128 nt, synthetic construct
  misc_feature 1..128: note = Description of Artificial Sequence: Synthetic polynucleotide
  source 1..128: mol_type = other RNA
ttggtgactgccacgcccaagttttagagctagaaatagcaagttaaaataaggctagtccgttatcaacttgaaaaagtggcaccgagtcggtgcgcagtgaacatcccttgggcgtggcagtcacc

SEQ ID NO: 4761 - RNA, 128 nt, synthetic construct
  misc_feature 1..128: note = Description of Artificial Sequence: Synthetic polynucleotide
  source 1..128: mol_type = other RNA
ttggtgactgccacgcccaagttttagagctagaaatagcaagttaaaataaggctagtccgttatcaacttgaaaaagtggcaccgagtcggtgcagcagtgaacaccccttgggcgtggcagtcac

SEQ ID NO: 4762 - RNA, 128 nt, synthetic construct
  misc_feature 1..128: note = Description of Artificial Sequence: Synthetic polynucleotide
  source 1..128: mol_type = other RNA
ttggtgactgccacgcccaagttttagagctagaaatagcaagttaaaataaggctagtccgttatcaacttgaaaaagtggcaccgagtcggtgcagtgaacaccccttgggcgtggcagtcatttt

SEQ ID NO: 4763 - RNA, 128 nt, synthetic construct
  misc_feature 1..128: note = Description of Artificial Sequence: Synthetic polynucleotide
  source 1..128: mol_type = other RNA
ttggtgactgccacgcccaagttttagagctagaaatagcaagttaaaataaggctagtccgttatcaacttgaaaaagtggcaccgagtcggtgcgaggccagcagtgaacaccccttgggcgtggc

SEQ ID NO: 4764 - RNA, 128 nt, synthetic construct
  misc_feature 1..128: note = Description of Artificial Sequence: Synthetic polynucleotide
  source 1..128: mol_type = other RNA
gttggtgactgccacgcccaagttttagagctagaaatagcaagttaaaataaggctagtccgttatcaacttgaaaaagtggcaccgagtcggtgcagtgaacaccccttgggcgtggcagtttttt

SEQ ID NO: 4765 - RNA, 128 nt, synthetic construct
  misc_feature 1..128: note = Description of Artificial Sequence: Synthetic polynucleotide
  source 1..128: mol_type = other RNA
ttggtgactgccacgcccaagttttagagctagaaatagcaagttaaaataaggctagtccgttatcaacttgaaaaagtggcaccgagtcggtgcggaggccagcagtgaacaccccttgggcgtgg

SEQ ID NO: 4766 - RNA, 128 nt, synthetic construct
  misc_feature 1..128: note = Description of Artificial Sequence: Synthetic polynucleotide
  source 1..128: mol_type = other RNA
gttggtgactgccacgcccaagttttagagctagaaatagcaagttaaaataaggctagtccgttatcaacttgaaaaagtggcaccgagtcggtgcgcagtgaacaccccttgggcgtggctttttt

SEQ ID NO: 4767 - RNA, 128 nt, synthetic construct
  misc_feature 1..128: note = Description of Artificial Sequence: Synthetic polynucleotide
  source 1..128: mol_type = other RNA
ttggtgactgccacgcccaagttttagagctagaaatagcaagttaaaataaggctagtccgttatcaacttgaaaaagtggcaccgagtcggtgcaggccagcagtgaacaccccttgggcgtggca

SEQ ID NO: 4768 - RNA, 128 nt, synthetic construct
  misc_feature 1..128: note = Description of Artificial Sequence: Synthetic polynucleotide
  source 1..128: mol_type = other RNA
ttggtgactgccacgcccaagttttagagctagaaatagcaagttaaaataaggctagtccgttatcaacttgaaaaagtggcaccgagtcggtgcggccagcagtgaacaccccttgggcgtggcag

SEQ ID NO: 4769 - RNA, 128 nt, synthetic construct
  misc_feature 1..128: note = Description of Artificial Sequence: Synthetic polynucleotide
  source 1..128: mol_type = other RNA
ttggtgactgccacgcccaagttttagagctagaaatagcaagttaaaataaggctagtccgttatcaacttgaaaaagtggcaccgagtcggtgcaacatcccttgggcgtggcagtcaccaatttt

SEQ ID NO: 4770 - RNA, 128 nt, synthetic construct
  misc_feature 1..128: note = Description of Artificial Sequence: Synthetic polynucleotide
  source 1..128: mol_type = other RNA
ttggtgactgccacgcccaagttttagagctagaaatagcaagttaaaataaggctagtccgttatcaacttgaaaaagtggcaccgagtcggtgcgaacatcccttgggcgtggcagtcaccatttt

SEQ ID NO: 4771 - RNA, 128 nt, synthetic construct
  misc_feature 1..128: note = Description of Artificial Sequence: Synthetic polynucleotide
  source 1..128: mol_type = other RNA
gttggtgactgccacgcccaagttttagagctagaaatagcaagttaaaataaggctagtccgttatcaacttgaaaaagtggcaccgagtcggtgcaacaccccttgggcgtggcagtcactttttt

SEQ ID NO: 4772 - RNA, 128 nt, synthetic construct
  misc_feature 1..128: note = Description of Artificial Sequence: Synthetic polynucleotide
  source 1..128: mol_type = other RNA
ttggtgactgccacgcccaagttttagagctagaaatagcaagttaaaataaggctagtccgttatcaacttgaaaaagtggcaccgagtcggtgcgtgaacatcccttgggcgtggcagtcactttt

SEQ ID NO: 4773 - RNA, 128 nt, synthetic construct
  misc_feature 1..128: note = Description of Artificial Sequence: Synthetic polynucleotide
  source 1..128: mol_type = other RNA
gttggtgactgccacgcccaagttttagagctagaaatagcaagttaaaataaggctagtccgttatcaacttgaaaaagtggcaccgagtcggtgcgaacaccccttgggcgtggcagtcttttttt

SEQ ID NO: 4774 - RNA, 128 nt, synthetic construct
  misc_feature 1..128: note = Description of Artificial Sequence: Synthetic polynucleotide
  source 1..128: mol_type = other RNA
gttggtgactgccacgcccaagttttagagctagaaatagcaagttaaaataaggctagtccgttatcaacttgaaaaagtggcaccgagtcggtgcaacaccccttgggcgtggcagtcattttttt

SEQ ID NO: 4775 - RNA, 128 nt, synthetic construct
  misc_feature 1..128: note = Description of Artificial Sequence: Synthetic polynucleotide
  source 1..128: mol_type = other RNA
gttggtgactgccacgcccaagttttagagctagaaatagcaagttaaaataaggctagtccgttatcaacttgaaaaagtggcaccgagtcggtgcagtgaacaccccttgggcgtggcattttttt

SEQ ID NO: 4776 - RNA, 128 nt, synthetic construct
  misc_feature 1..128: note = Description of Artificial Sequence: Synthetic polynucleotide
  source 1..128: mol_type = other RNA
ttggtgactgccacgcccaagttttagagctagaaatagcaagttaaaataaggctagtccgttatcaacttgaaaaagtggcaccgagtcggtgcgccagcagtgaacatcccttgggcgtggcagt

SEQ ID NO: 4777 - RNA, 128 nt, synthetic construct
  misc_feature 1..128: note = Description of Artificial Sequence: Synthetic polynucleotide
  source 1..128: mol_type = other RNA
gttggtgactgccacgcccaagttttagagctagaaatagcaagttaaaataaggctagtccgttatcaacttgaaaaagtggcaccgagtcggtgctgaacaccccttgggcgtggcagtttttttt

SEQ ID NO: 4778 - RNA, 128 nt, synthetic construct
  misc_feature 1..128: note = Description of Artificial Sequence: Synthetic polynucleotide
  source 1..128: mol_type = other RNA
ttggtgactgccacgcccaagttttagagctagaaatagcaagttaaaataaggctagtccgttatcaacttgaaaaagtggcaccgagtcggtgcgcagtgaacatcccttgggcgtggcagttttt

SEQ ID NO: 4779 - RNA, 128 nt, synthetic construct
  misc_feature 1..128: note = Description of Artificial Sequence: Synthetic polynucleotide
  source 1..128: mol_type = other RNA
ttggtgactgccacgcccaagttttagagctagaaatagcaagttaaaataaggctagtccgttatcaacttgaaaaagtggcaccgagtcggtgcagtgaacatcccttgggcgtggcagtcatttt

SEQ ID NO: 4780 - RNA, 128 nt, synthetic construct
  misc_feature 1..128: note = Description of Artificial Sequence: Synthetic polynucleotide
  source 1..128: mol_type = other RNA
ttggtgactgccacgcccaagttttagagctagaaatagcaagttaaaataaggctagtccgttatcaacttgaaaaagtggcaccgagtcggtgcagtgaacatcccttgggcgtggcagtcaccaa

SEQ ID NO: 4781 - RNA, 128 nt, synthetic construct
  misc_feature 1..128: note = Description of Artificial Sequence: Synthetic polynucleotide
  source 1..128: mol_type = other RNA
ttggtgactgccacgcccaagttttagagctagaaatagcaagttaaaataaggctagtccgttatcaacttgaaaaagtggcaccgagtcggtgcagcagtgaacatcccttgggcgtggcagtttt

SEQ ID NO: 4782 - RNA, 128 nt, synthetic construct
  misc_feature 1..128: note = Description of Artificial Sequence: Synthetic polynucleotide
  source 1..128: mol_type = other RNA
ttggtgactgccacgcccaagttttagagctagaaatagcaagttaaaataaggctagtccgttatcaacttgaaaaagtggcaccgagtcggtgctgaacatcccttgggcgtggcagtcacctttt

SEQ ID NO: 4783 - RNA, 128 nt, synthetic construct
  misc_feature 1..128: note = Description of Artificial Sequence: Synthetic polynucleotide
  source 1..128: mol_type = other RNA
gttggtgactgccacgcccaagttttagagctagaaatagcaagttaaaataaggctagtccgttatcaacttgaaaaagtggcaccgagtcggtgcgcagtgaacaccccttgggcgtggttttttt

SEQ ID NO: 4784 - RNA, 128 nt, synthetic construct
  misc_feature 1..128: note = Description of Artificial Sequence: Synthetic polynucleotide
  source 1..128: mol_type = other RNA
ttggtgactgccacgcccaagttttagagctagaaatagcaagttaaaataaggctagtccgttatcaacttgaaaaagtggcaccgagtcggtgcagcagtgaacatcccttgggcgtggcagtcac

SEQ ID NO: 4785 - RNA, 128 nt, synthetic construct
  misc_feature 1..128: note = Description of Artificial Sequence: Synthetic polynucleotide
  source 1..128: mol_type = other RNA
ttggtgactgccacgcccaagttttagagctagaaatagcaagttaaaataaggctagtccgttatcaacttgaaaaagtggcaccgagtcggtgcagtgaacaccccttgggcgtggcagtcaccaa

SEQ ID NO: 4786 - RNA, 128 nt, synthetic construct
  misc_feature 1..128: note = Description of Artificial Sequence: Synthetic polynucleotide
  source 1..128: mol_type = other RNA
gttggtgactgccacgcccaagttttagagctagaaatagcaagttaaaataaggctagtccgttatcaacttgaaaaagtggcaccgagtcggtgctgaacaccccttgggcgtggcagtctttttt

SEQ ID NO: 4787 - RNA, 128 nt, synthetic construct
  misc_feature 1..128: note = Description of Artificial Sequence: Synthetic polynucleotide
  source 1..128: mol_type = other RNA
gttggtgactgccacgcccaagttttagagctagaaatagcaagttaaaataaggctagtccgttatcaacttgaaaaagtggcaccgagtcggtgcacaccccttgggcgtggcagtcacttttttt

SEQ ID NO: 4788 - RNA, 128 nt, synthetic construct
  misc_feature 1..128: note = Description of Artificial Sequence: Synthetic polynucleotide
  source 1..128: mol_type = other RNA
ttggtgactgccacgcccaagttttagagctagaaatagcaagttaaaataaggctagtccgttatcaacttgaaaaagtggcaccgagtcggtgcagcagtgaacaccccttgggcgtggcagtttt

SEQ ID NO: 4789 - RNA, 128 nt, synthetic construct
  misc_feature 1..128: note = Description of Artificial Sequence: Synthetic polynucleotide
  source 1..128: mol_type = other RNA
ttggtgactgccacgcccaagttttagagctagaaatagcaagttaaaataaggctagtccgttatcaacttgaaaaagtggcaccgagtcggtgcccagcagtgaacaccccttgggcgtggcagtc

SEQ ID NO: 4790 - RNA, 129 nt, synthetic construct
  misc_feature 1..129: note = Description of Artificial Sequence: Synthetic polynucleotide
  source 1..129: mol_type = other RNA
gttggtgactgccacgcccaagttttagagctagaaatagcaagttaaaataaggctagtccgttatcaacttgaaaaagtggcaccgagtcggtgcaacaccccttgggcgtggcagtcacttttttt

SEQ ID NO: 4791 - RNA, 129 nt, synthetic construct
  misc_feature 1..129: note = Description of Artificial Sequence: Synthetic polynucleotide
  source 1..129: mol_type = other RNA
ttggtgactgccacgcccaagttttagagctagaaatagcaagttaaaataaggctagtccgttatcaacttgaaaaagtggcaccgagtcggtgcagtgaacatcccttgggcgtggcagtcactttt

SEQ ID NO: 4792 - RNA, 129 nt, synthetic construct
  misc_feature 1..129: note = Description of Artificial Sequence: Synthetic polynucleotide
  source 1..129: mol_type = other RNA
ttggtgactgccacgcccaagttttagagctagaaatagcaagttaaaataaggctagtccgttatcaacttgaaaaagtggcaccgagtcggtgcaggccagcagtgaacaccccttgggcgtggcag

SEQ ID NO: 4793 - RNA, 129 nt, synthetic construct
  misc_feature 1..129: note = Description of Artificial Sequence: Synthetic polynucleotide
  source 1..129: mol_type = other RNA
ttggtgactgccacgcccaagttttagagctagaaatagcaagttaaaataaggctagtccgttatcaacttgaaaaagtggcaccgagtcggtgcgaacatcccttgggcgtggcagtcaccaatttt

SEQ ID NO: 4794 - RNA, 129 nt, synthetic construct
  misc_feature 1..129: note = Description of Artificial Sequence: Synthetic polynucleotide
  source 1..129: mol_type = other RNA
gttggtgactgccacgcccaagttttagagctagaaatagcaagttaaaataaggctagtccgttatcaacttgaaaaagtggcaccgagtcggtgcagtgaacaccccttgggcgtggcagttttttt

SEQ ID NO: 4795 - RNA, 129 nt, synthetic construct
  misc_feature 1..129: note = Description of Artificial Sequence: Synthetic polynucleotide
  source 1..129: mol_type = other RNA
ttggtgactgccacgcccaagttttagagctagaaatagcaagttaaaataaggctagtccgttatcaacttgaaaaagtggcaccgagtcggtgcgccagcagtgaacatcccttgggcgtggcagtc

SEQ ID NO: 4796 - RNA, 129 nt, synthetic construct
  misc_feature 1..129: note = Description of Artificial Sequence: Synthetic polynucleotide
  source 1..129: mol_type = other RNA
gttggtgactgccacgcccaagttttagagctagaaatagcaagttaaaataaggctagtccgttatcaacttgaaaaagtggcaccgagtcggtgcagcagtgaacaccccttgggcgtggctttttt

SEQ ID NO: 4797 - RNA, 129 nt, synthetic construct
  misc_feature 1..129: note = Description of Artificial Sequence: Synthetic polynucleotide
  source 1..129: mol_type = other RNA
ttggtgactgccacgcccaagttttagagctagaaatagcaagttaaaataaggctagtccgttatcaacttgaaaaagtggcaccgagtcggtgcgcagtgaacatcccttgggcgtggcagtctttt

SEQ ID NO: 4798 - RNA, 129 nt, synthetic construct
  misc_feature 1..129: note = Description of Artificial Sequence: Synthetic polynucleotide
  source 1..129: mol_type = other RNA
gttggtgactgccacgcccaagttttagagctagaaatagcaagttaaaataaggctagtccgttatcaacttgaaaaagtggcaccgagtcggtgcgtgaacaccccttgggcgtggcagtctttttt

SEQ ID NO: 4799 - RNA, 129 nt, synthetic construct
  misc_feature 1..129: note = Description of Artificial Sequence: Synthetic polynucleotide
  source 1..129: mol_type = other RNA
ttggtgactgccacgcccaagttttagagctagaaatagcaagttaaaataaggctagtccgttatcaacttgaaaaagtggcaccgagtcggtgcggccagcagtgaacaccccttgggcgtggcagt

SEQ ID NO: 4800 - RNA, 129 nt, synthetic construct
  misc_feature 1..129: note = Description of Artificial Sequence: Synthetic polynucleotide
  source 1..129: mol_type = other RNA
gttggtgactgccacgcccaagttttagagctagaaatagcaagttaaaataaggctagtccgttatcaacttgaaaaagtggcaccgagtcggtgctgaacaccccttgggcgtggcagtcttttttt

SEQ ID NO: 4801 - RNA, 129 nt, synthetic construct
  misc_feature 1..129: note = Description of Artificial Sequence: Synthetic polynucleotide
  source 1..129: mol_type = other RNA
ttggtgactgccacgcccaagttttagagctagaaatagcaagttaaaataaggctagtccgttatcaacttgaaaaagtggcaccgagtcggtgcgaggccagcagtgaacaccccttgggcgtggca

SEQ ID NO: 4802 - RNA, 129 nt, synthetic construct
  misc_feature 1..129: note = Description of Artificial Sequence: Synthetic polynucleotide
  source 1..129: mol_type = other RNA
ttggtgactgccacgcccaagttttagagctagaaatagcaagttaaaataaggctagtccgttatcaacttgaaaaagtggcaccgagtcggtgcagcagtgaacatcccttgggcgtggcagtcacc

SEQ ID NO: 4803 - RNA, 129 nt, synthetic construct
  misc_feature 1..129: note = Description of Artificial Sequence: Synthetic polynucleotide
  source 1..129: mol_type = other RNA
ttggtgactgccacgcccaagttttagagctagaaatagcaagttaaaataaggctagtccgttatcaacttgaaaaagtggcaccgagtcggtgcgtgaacatcccttgggcgtggcagtcacctttt

SEQ ID NO: 4804 - RNA, 129 nt, synthetic construct
  misc_feature 1..129: note = Description of Artificial Sequence: Synthetic polynucleotide
  source 1..129: mol_type = other RNA
ttggtgactgccacgcccaagttttagagctagaaatagcaagttaaaataaggctagtccgttatcaacttgaaaaagtggcaccgagtcggtgcgcagtgaacatcccttgggcgtggcagtcacca

SEQ ID NO: 4805 - RNA, 129 nt, synthetic construct
  misc_feature 1..129: note = Description of Artificial Sequence: Synthetic polynucleotide
  source 1..129: mol_type = other RNA
ttggtgactgccacgcccaagttttagagctagaaatagcaagttaaaataaggctagtccgttatcaacttgaaaaagtggcaccgagtcggtgcagcagtgaacatcccttgggcgtggcagttttt

SEQ ID NO: 4806 - RNA, 129 nt, synthetic construct
  misc_feature 1..129: note = Description of Artificial Sequence: Synthetic polynucleotide
  source 1..129: mol_type = other RNA
gttggtgactgccacgcccaagttttagagctagaaatagcaagttaaaataaggctagtccgttatcaacttgaaaaagtggcaccgagtcggtgcgaacaccccttgggcgtggcagtcattttttt

SEQ ID NO: 4807 - RNA, 129 nt, synthetic construct
  misc_feature 1..129: note = Description of Artificial Sequence: Synthetic polynucleotide
  source 1..129: mol_type = other RNA
ttggtgactgccacgcccaagttttagagctagaaatagcaagttaaaataaggctagtccgttatcaacttgaaaaagtggcaccgagtcggtgctgaacatcccttgggcgtggcagtcaccatttt

SEQ ID NO: 4808 - RNA, 129 nt, synthetic construct
  misc_feature 1..129: note = Description of Artificial Sequence: Synthetic polynucleotide
  source 1..129: mol_type = other RNA
ttggtgactgccacgcccaagttttagagctagaaatagcaagttaaaataaggctagtccgttatcaacttgaaaaagtggcaccgagtcggtgcgccagcagtgaacatcccttgggcgtggctttt

SEQ ID NO: 4809 - RNA, 129 nt, synthetic construct
  misc_feature 1..129: note = Description of Artificial Sequence: Synthetic polynucleotide
  source 1..129: mol_type = other RNA
ttggtgactgccacgcccaagttttagagctagaaatagcaagttaaaataaggctagtccgttatcaacttgaaaaagtggcaccgagtcggtgcgcagtgaacaccccttgggcgtggcagtcacca

SEQ ID NO: 4810 - RNA, 129 nt, synthetic construct
  misc_feature 1..129: note = Description of Artificial Sequence: Synthetic polynucleotide
  source 1..129: mol_type = other RNA
gttggtgactgccacgcccaagttttagagctagaaatagcaagttaaaataaggctagtccgttatcaacttgaaaaagtggcaccgagtcggtgcgaacaccccttgggcgtggcagtcactttttt

SEQ ID NO: 4811 - RNA, 129 nt, synthetic construct
  misc_feature 1..129: note = Description of Artificial Sequence: Synthetic polynucleotide
  source 1..129: mol_type = other RNA
gttggtgactgccacgcccaagttttagagctagaaatagcaagttaaaataaggctagtccgttatcaacttgaaaaagtggcaccgagtcggtgcagcagtgaacaccccttgggcgtggcagtcac

SEQ ID NO: 4812 - RNA, 129 nt, synthetic construct
  misc_feature 1..129: note = Description of Artificial Sequence: Synthetic polynucleotide
  source 1..129: mol_type = other RNA
ttggtgactgccacgcccaagttttagagctagaaatagcaagttaaaataaggctagtccgttatcaacttgaaaaagtggcaccgagtcggtgcagcagtgaacaccccttgggcgtggcagtcacc

SEQ ID NO: 4813 - RNA, 129 nt, synthetic construct
  misc_feature 1..129: note = Description of Artificial Sequence: Synthetic polynucleotide
  source 1..129: mol_type = other RNA
gttggtgactgccacgcccaagttttagagctagaaatagcaagttaaaataaggctagtccgttatcaacttgaaaaagtggcaccgagtcggtgcgtgaacaccccttgggcgtggcagtttttttt

SEQ ID NO: 4814 - RNA, 129 nt, synthetic construct
  misc_feature 1..129: note = Description of Artificial Sequence: Synthetic polynucleotide
  source 1..129: mol_type = other RNA
gttggtgactgccacgcccaagttttagagctagaaatagcaagttaaaataaggctagtccgttatcaacttgaaaaagtggcaccgagtcggtgcagcagtgaacaccccttgggcgtggttttttt

SEQ ID NO: 4815 - RNA, 129 nt, synthetic construct
  misc_feature 1..129: note = Description of Artificial Sequence: Synthetic polynucleotide
  source 1..129: mol_type = other RNA
gttggtgactgccacgcccaagttttagagctagaaatagcaagttaaaataaggctagtccgttatcaacttgaaaaagtggcaccgagtcggtgcgcagtgaacaccccttgggcgtggcttttttt

SEQ ID NO: 4816 - RNA, 129 nt, synthetic construct
  misc_feature 1..129: note = Description of Artificial Sequence: Synthetic polynucleotide
  source 1..129: mol_type = other RNA
ttggtgactgccacgcccaagttttagagctagaaatagcaagttaaaataaggctagtccgttatcaacttgaaaaagtggcaccgagtcggtgcggaggccagcagtgaacaccccttgggcgtggc

SEQ ID NO: 4817 - RNA, 129 nt, synthetic construct
  misc_feature 1..129: note = Description of Artificial Sequence: Synthetic polynucleotide
  source 1..129: mol_type = other RNA
ttggtgactgccacgcccaagttttagagctagaaatagcaagttaaaataaggctagtccgttatcaacttgaaaaagtggcaccgagtcggtgcgccagcagtgaacaccccttgggcgtggcagtc

SEQ ID NO: 4818 - RNA, 130 nt, synthetic construct
  misc_feature 1..130: note = Description of Artificial Sequence: Synthetic polynucleotide
  source 1..130: mol_type = other RNA
ttggtgactgccacgcccaagttttagagctagaaatagcaagttaaaataaggctagtccgttatcaacttgaaaaagtggcaccgagtcggtgcgcagtgaacatcccttgggcgtggcagtcatttt

SEQ ID NO: 4819 - RNA, 130 nt, synthetic construct
  misc_feature 1..130: note = Description of Artificial Sequence: Synthetic polynucleotide
  source 1..130: mol_type = other RNA
ttggtgactgccacgcccaagttttagagctagaaatagcaagttaaaataaggctagtccgttatcaacttgaaaaagtggcaccgagtcggtgcagcagtgaacatcccttgggcgtggcagtctttt

SEQ ID NO: 4820 - RNA, 130 nt, synthetic construct
  misc_feature 1..130: note = Description of Artificial Sequence: Synthetic polynucleotide
  source 1..130: mol_type = other RNA
ttggtgactgccacgcccaagttttagagctagaaatagcaagttaaaataaggctagtccgttatcaacttgaaaaagtggcaccgagtcggtgcgccagcagtgaacatcccttgggcgtggcagtca

SEQ ID NO: 4821 - RNA, 130 nt, synthetic construct
  misc_feature 1..130: note = Description of Artificial Sequence: Synthetic polynucleotide
  source 1..130: mol_type = other RNA
ttggtgactgccacgcccaagttttagagctagaaatagcaagttaaaataaggctagtccgttatcaacttgaaaaagtggcaccgagtcggtgcgccagcagtgaacatcccttgggcgtggcatttt

SEQ ID NO: 4822 - RNA, 130 nt, synthetic construct
  misc_feature 1..130: note = Description of Artificial Sequence: Synthetic polynucleotide
  source 1..130: mol_type = other RNA
ttggtgactgccacgcccaagttttagagctagaaatagcaagttaaaataaggctagtccgttatcaacttgaaaaagtggcaccgagtcggtgcagcagtgaacatcccttgggcgtggcagtcacca

SEQ ID NO: 4823 - RNA, 130 nt, synthetic construct
  misc_feature 1..130: note = Description of Artificial Sequence: Synthetic polynucleotide
  source 1..130: mol_type = other RNA
ttggtgactgccacgcccaagttttagagctagaaatagcaagttaaaataaggctagtccgttatcaacttgaaaaagtggcaccgagtcggtgcgtgaacatcccttgggcgtggcagtcaccatttt

SEQ ID NO: 4824 - RNA, 130 nt, synthetic construct
  misc_feature 1..130: note = Description of Artificial Sequence: Synthetic polynucleotide
  source 1..130: mol_type = other RNA
ttggtgactgccacgcccaagttttagagctagaaatagcaagttaaaataaggctagtccgttatcaacttgaaaaagtggcaccgagtcggtgcgcagtgaacaccccttgggcgtggcagtcatttt

SEQ ID NO: 4825 - RNA, 130 nt, synthetic construct
  misc_feature 1..130: note = Description of Artificial Sequence: Synthetic polynucleotide
  source 1..130: mol_type = other RNA
ttggtgactgccacgcccaagttttagagctagaaatagcaagttaaaataaggctagtccgttatcaacttgaaaaagtggcaccgagtcggtgcagtgaacatcccttgggcgtggcagtcacctttt

SEQ ID NO: 4826 - RNA, 130 nt, synthetic construct
  misc_feature 1..130: note = Description of Artificial Sequence: Synthetic polynucleotide
  source 1..130: mol_type = other RNA
ttggtgactgccacgcccaagttttagagctagaaatagcaagttaaaataaggctagtccgttatcaacttgaaaaagtggcaccgagtcggtgcggccagcagtgaacaccccttgggcgtggcagtc

SEQ ID NO: 4827 - RNA, 130 nt, synthetic construct
  misc_feature 1..130: note = Description of Artificial Sequence: Synthetic polynucleotide
  source 1..130: mol_type = other RNA
ttggtgactgccacgcccaagttttagagctagaaatagcaagttaaaataaggctagtccgttatcaacttgaaaaagtggcaccgagtcggtgcgccagcagtgaacaccccttgggcgtggcagtca

SEQ ID NO: 4828 - RNA, 130 nt, synthetic construct
  misc_feature 1..130: note = Description of Artificial Sequence: Synthetic polynucleotide
  source 1..130: mol_type = other RNA
ttggtgactgccacgcccaagttttagagctagaaatagcaagttaaaataaggctagtccgttatcaacttgaaaaagtggcaccgagtcggtgcgcggaggccagcagtgaacaccccttgggcgtgg

SEQ ID NO: 4829 - RNA, 130 nt, synthetic construct
  misc_feature 1..130: note = Description of Artificial Sequence: Synthetic polynucleotide
  source 1..130: mol_type = other RNA
ttggtgactgccacgcccaagttttagagctagaaatagcaagttaaaataaggctagtccgttatcaacttgaaaaagtggcaccgagtcggtgctgaacatcccttgggcgtggcagtcaccaatttt

SEQ ID NO: 4830 - RNA, 130 nt, synthetic construct
  misc_feature 1..130: note = Description of Artificial Sequence: Synthetic polynucleotide
  source 1..130: mol_type = other RNA
gttggtgactgccacgcccaagttttagagctagaaatagcaagttaaaataaggctagtccgttatcaacttgaaaaagtggcaccgagtcggtgcgtgaacaccccttgggcgtggcagtcttttttt

SEQ ID NO: 4831 - RNA, 130 nt, synthetic construct
  misc_feature 1..130: note = Description of Artificial Sequence: Synthetic polynucleotide
  source 1..130: mol_type = other RNA
gttggtgactgccacgcccaagttttagagctagaaatagcaagttaaaataaggctagtccgttatcaacttgaaaaagtggcaccgagtcggtgcagtgaacaccccttgggcgtggcagtttttttt

SEQ ID NO: 4832 - RNA, 130 nt, synthetic construct
  misc_feature 1..130: note = Description of Artificial Sequence: Synthetic polynucleotide
  source 1..130: mol_type = other RNA
ttggtgactgccacgcccaagttttagagctagaaatagcaagttaaaataaggctagtccgttatcaacttgaaaaagtggcaccgagtcggtgcggaggccagcagtgaacaccccttgggcgtggca

SEQ ID NO: 4833 - RNA, 130 nt, synthetic construct
  misc_feature 1..130: note = Description of Artificial Sequence: Synthetic polynucleotide
  source 1..130: mol_type = other RNA
gttggtgactgccacgcccaagttttagagctagaaatagcaagttaaaataaggctagtccgttatcaacttgaaaaagtggcaccgagtcggtgcgaacaccccttgggcgtggcagtcacttttttt

SEQ ID NO: 4834 - RNA, 130 nt, synthetic construct
  misc_feature 1..130: note = Description of Artificial Sequence: Synthetic polynucleotide
  source 1..130: mol_type = other RNA
gttggtgactgccacgcccaagttttagagctagaaatagcaagttaaaataaggctagtccgttatcaacttgaaaaagtggcaccgagtcggtgcagtgaacaccccttgggcgtggcagtctttttt

SEQ ID NO: 4835 - RNA, 130 nt, synthetic construct
  misc_feature 1..130: note = Description of Artificial Sequence: Synthetic polynucleotide
  source 1..130: mol_type = other RNA
ttggtgactgccacgcccaagttttagagctagaaatagcaagttaaaataaggctagtccgttatcaacttgaaaaagtggcaccgagtcggtgcgcagtgaacaccccttgggcgtggcagtcaccaa

SEQ ID NO: 4836 - RNA, 130 nt, synthetic construct
  misc_feature 1..130: note = Description of Artificial Sequence: Synthetic polynucleotide
  source 1..130: mol_type = other RNA
ttggtgactgccacgcccaagttttagagctagaaatagcaagttaaaataaggctagtccgttatcaacttgaaaaagtggcaccgagtcggtgcaggccagcagtgaacaccccttgggcgtggcagt

SEQ ID NO: 4837 - RNA, 130 nt, synthetic construct
  misc_feature 1..130: note = Description of Artificial Sequence: Synthetic polynucleotide
  source 1..130: mol_type = other RNA
gttggtgactgccacgcccaagttttagagctagaaatagcaagttaaaataaggctagtccgttatcaacttgaaaaagtggcaccgagtcggtgcgcagtgaacaccccttgggcgtggcattttttt

SEQ ID NO: 4838 - RNA, 130 nt, synthetic construct
  misc_feature 1..130: note = Description of Artificial Sequence: Synthetic polynucleotide
  source 1..130: mol_type = other RNA
gttggtgactgccacgcccaagttttagagctagaaatagcaagttaaaataaggctagtccgttatcaacttgaaaaagtggcaccgagtcggtgcagcagtgaacaccccttgggcgtggcttttttt

SEQ ID NO: 4839 - RNA, 130 nt, synthetic construct
  misc_feature 1..130: note = Description of Artificial Sequence: Synthetic polynucleotide
  source 1..130: mol_type = other RNA
ttggtgactgccacgcccaagttttagagctagaaatagcaagttaaaataaggctagtccgttatcaacttgaaaaagtggcaccgagtcggtgcgaggccagcagtgaacaccccttgggcgtggcag

SEQ ID NO: 4840 - RNA, 130 nt, synthetic construct
  misc_feature 1..130: note = Description of Artificial Sequence: Synthetic polynucleotide
  source 1..130: mol_type = other RNA
ttggtgactgccacgcccaagttttagagctagaaatagcaagttaaaataaggctagtccgttatcaacttgaaaaagtggcaccgagtcggtgcagcagtgaacaccccttgggcgtggcagtcacca

SEQ ID NO: 4841 - RNA, 130 nt, synthetic construct
  misc_feature 1..130: note = Description of Artificial Sequence: Synthetic polynucleotide
  source 1..130: mol_type = other RNA
ttggtgactgccacgcccaagttttagagctagaaatagcaagttaaaataaggctagtccgttatcaacttgaaaaagtggcaccgagtcggtgcgcagtgaacatcccttgggcgtggcagtcaccaa

SEQ ID NO: 4842 - RNA, 130 nt, synthetic construct
  misc_feature 1..130: note = Description of Artificial Sequence: Synthetic polynucleotide
  source 1..130: mol_type = other RNA
ttggtgactgccacgcccaagttttagagctagaaatagcaagttaaaataaggctagtccgttatcaacttgaaaaagtggcaccgagtcggtgccggaggccagcagtgaacaccccttgggcgtggc

SEQ ID NO: 4843 - RNA, 130 nt, synthetic construct
  misc_feature 1..130: note = Description of Artificial Sequence: Synthetic polynucleotide
  source 1..130: mol_type = other RNA
gttggtgactgccacgcccaagttttagagctagaaatagcaagttaaaataaggctagtccgttatcaacttgaaaaagtggcaccgagtcggtgcaacaccccttgggcgtggcagtcaccatttttt

SEQ ID NO: 4844 - RNA, 130 nt, synthetic construct
  misc_feature 1..130: note = Description of Artificial Sequence: Synthetic polynucleotide
  source 1..130: mol_type = other RNA
gttggtgactgccacgcccaagttttagagctagaaatagcaagttaaaataaggctagtccgttatcaacttgaaaaagtggcaccgagtcggtgctgaacaccccttgggcgtggcagtcattttttt

SEQ ID NO: 4845 - RNA, 131 nt, synthetic construct
  misc_feature 1..131: note = Description of Artificial Sequence: Synthetic polynucleotide
  source 1..131: mol_type = other RNA
gttggtgactgccacgcccaagttttagagctagaaatagcaagttaaaataaggctagtccgttatcaacttgaaaaagtggcaccgagtcggtgcgaacaccccttgggcgtggcagtcaccatttttt

SEQ ID NO: 4846 - RNA, 131 nt, synthetic construct
  misc_feature 1..131: note = Description of Artificial Sequence: Synthetic polynucleotide
  source 1..131: mol_type = other RNA
gttggtgactgccacgcccaagttttagagctagaaatagcaagttaaaataaggctagtccgttatcaacttgaaaaagtggcaccgagtcggtgcgcagtgaacaccccttgggcgtggcagttttttt

SEQ ID NO: 4847 - RNA, 131 nt, synthetic construct
  misc_feature 1..131: note = Description of Artificial Sequence: Synthetic polynucleotide
  source 1..131: mol_type = other RNA
ttggtgactgccacgcccaagttttagagctagaaatagcaagttaaaataaggctagtccgttatcaacttgaaaaagtggcaccgagtcggtgcagtgaacatcccttgggcgtggcagtcaccatttt

SEQ ID NO: 4848 - RNA, 131 nt, synthetic construct
  misc_feature 1..131: note = Description of Artificial Sequence: Synthetic polynucleotide
  source 1..131: mol_type = other RNA
ttggtgactgccacgcccaagttttagagctagaaatagcaagttaaaataaggctagtccgttatcaacttgaaaaagtggcaccgagtcggtgcaggccagcagtgaacaccccttgggcgtggcagtc

SEQ ID NO: 4849 - RNA, 131 nt, synthetic construct
  misc_feature 1..131: note = Description of Artificial Sequence: Synthetic polynucleotide
  source 1..131: mol_type = other RNA
gttggtgactgccacgcccaagttttagagctagaaatagcaagttaaaataaggctagtccgttatcaacttgaaaaagtggcaccgagtcggtgcgtgaacaccccttgggcgtggcagtcattttttt

SEQ ID NO: 4850 - RNA, 131 nt, synthetic construct
  misc_feature 1..131: note = Description of Artificial Sequence: Synthetic polynucleotide
  source 1..131: mol_type = other RNA
gttggtgactgccacgcccaagttttagagctagaaatagcaagttaaaataaggctagtccgttatcaacttgaaaaagtggcaccgagtcggtgcgtgaacaccccttgggcgtggcagtcactttttt

SEQ ID NO: 4851 - RNA, 131 nt, synthetic construct
  misc_feature 1..131: note = Description of Artificial Sequence: Synthetic polynucleotide
  source 1..131: mol_type = other RNA
ttggtgactgccacgcccaagttttagagctagaaatagcaagttaaaataaggctagtccgttatcaacttgaaaaagtggcaccgagtcggtgcgtgaacatcccttgggcgtggcagtcaccaatttt

SEQ ID NO: 4852 - RNA, 131 nt, synthetic construct
  misc_feature 1..131: note = Description of Artificial Sequence: Synthetic polynucleotide
  source 1..131: mol_type = other RNA
ttggtgactgccacgcccaagttttagagctagaaatagcaagttaaaataaggctagtccgttatcaacttgaaaaagtggcaccgagtcggtgcgccagcagtgaacaccccttgggcgtggcagtcac

SEQ ID NO: 4853 - RNA, 131 nt, synthetic construct
  misc_feature 1..131: note = Description of Artificial Sequence: Synthetic polynucleotide
  source 1..131: mol_type = other RNA
gttggtgactgccacgcccaagttttagagctagaaatagcaagttaaaataaggctagtccgttatcaacttgaaaaagtggcaccgagtcggtgctgaacaccccttgggcgtggcagtcacttttttt

SEQ ID NO: 4854 - RNA, 131 nt, synthetic construct
  misc_feature 1..131: note = Description of Artificial Sequence: Synthetic polynucleotide
  source 1..131: mol_type = other RNA
ttggtgactgccacgcccaagttttagagctagaaatagcaagttaaaataaggctagtccgttatcaacttgaaaaagtggcaccgagtcggtgcgcagtgaacatcccttgggcgtggcagtcactttt

SEQ ID NO: 4855 - RNA, 131 nt, synthetic construct
  misc_feature 1..131: note = Description of Artificial Sequence: Synthetic polynucleotide
  source 1..131: mol_type = other RNA
gttggtgactgccacgcccaagttttagagctagaaatagcaagttaaaataaggctagtccgttatcaacttgaaaaagtggcaccgagtcggtgcagcagtgaacaccccttgggcgtggcagtttttt

SEQ ID NO: 4856 - RNA, 131 nt, synthetic construct
  misc_feature 1..131: note = Description of Artificial Sequence: Synthetic polynucleotide
  source 1..131: mol_type = other RNA
ttggtgactgccacgcccaagttttagagctagaaatagcaagttaaaataaggctagtccgttatcaacttgaaaaagtggcaccgagtcggtgcagcagtgaacaccccttgggcgtggcagtcaccaa

SEQ ID NO: 4857 - RNA, 131 nt, synthetic construct
  misc_feature 1..131: note = Description of Artificial Sequence: Synthetic polynucleotide
  source 1..131: mol_type = other RNA
ttggtgactgccacgcccaagttttagagctagaaatagcaagttaaaataaggctagtccgttatcaacttgaaaaagtggcaccgagtcggtgcgccagcagtgaacatcccttgggcgtggcagtcac

SEQ ID NO: 4858 - RNA, 131 nt, synthetic construct
  misc_feature 1..131: note = Description of Artificial Sequence: Synthetic polynucleotide
  source 1..131: mol_type = other RNA
gttggtgactgccacgcccaagttttagagctagaaatagcaagttaaaataaggctagtccgttatcaacttgaaaaagtggcaccgagtcggtgcagtgaacaccccttgggcgtggcagtcttttttt

SEQ ID NO: 4859 - RNA, 131 nt, synthetic construct
  misc_feature 1..131: note = Description of Artificial Sequence: Synthetic polynucleotide
  source 1..131: mol_type = other RNA
ttggtgactgccacgcccaagttttagagctagaaatagcaagttaaaataaggctagtccgttatcaacttgaaaaagtggcaccgagtcggtgcggaggccagcagtgaacaccccttgggcgtggcag

SEQ ID NO: 4860 - RNA, 131 nt, synthetic construct
  misc_feature 1..131: note = Description of Artificial Sequence: Synthetic polynucleotide
  source 1..131: mol_type = other RNA
ttggtgactgccacgcccaagttttagagctagaaatagcaagttaaaataaggctagtccgttatcaacttgaaaaagtggcaccgagtcggtgcagcagtgaacatcccttgggcgtggcagtcaccaa

SEQ ID NO: 4861 - RNA, 131 nt, synthetic construct
  misc_feature 1..131: note = Description of Artificial Sequence: Synthetic polynucleotide
  source 1..131: mol_type = other RNA
ttggtgactgccacgcccaagttttagagctagaaatagcaagttaaaataaggctagtccgttatcaacttgaaaaagtggcaccgagtcggtgctgcggaggccagcagtgaacaccccttgggcgtgg

SEQ ID NO: 4862 - RNA, 131 nt, synthetic construct
  misc_feature 1..131: note = Description of Artificial Sequence: Synthetic polynucleotide
  source 1..131: mol_type = other RNA
ttggtgactgccacgcccaagttttagagctagaaatagcaagttaaaataaggctagtccgttatcaacttgaaaaagtggcaccgagtcggtgcgcggaggccagcagtgaacaccccttgggcgtggc

SEQ ID NO: 4863 - RNA, 131 nt, synthetic construct
  misc_feature 1..131: note = Description of Artificial Sequence: Synthetic polynucleotide
  source 1..131: mol_type = other RNA
gttggtgactgccacgcccaagttttagagctagaaatagcaagttaaaataaggctagtccgttatcaacttgaaaaagtggcaccgagtcggtgcagcagtgaacaccccttgggcgtggcattttttt

SEQ ID NO: 4864 - RNA, 131 nt, synthetic construct
  misc_feature 1..131: note = Description of Artificial Sequence: Synthetic polynucleotide
  source 1..131: mol_type = other RNA
ttggtgactgccacgcccaagttttagagctagaaatagcaagttaaaataaggctagtccgttatcaacttgaaaaagtggcaccgagtcggtgcggccagcagtgaacaccccttgggcgtggcagtca

SEQ ID NO: 4865 - RNA, 131 nt, synthetic construct
  misc_feature 1..131: note = Description of Artificial Sequence: Synthetic polynucleotide
  source 1..131: mol_type = other RNA
ttggtgactgccacgcccaagttttagagctagaaatagcaagttaaaataaggctagtccgttatcaacttgaaaaagtggcaccgagtcggtgcgaggccagcagtgaacaccccttgggcgtggcagt

SEQ ID NO: 4866 - RNA, 131 nt, synthetic construct
  misc_feature 1..131: note = Description of Artificial Sequence: Synthetic polynucleotide
  source 1..131: mol_type = other RNA
ttggtgactgccacgcccaagttttagagctagaaatagcaagttaaaataaggctagtccgttatcaacttgaaaaagtggcaccgagtcggtgcagcagtgaacatcccttgggcgtggcagtcatttt

SEQ ID NO: 4867 - RNA, 131 nt, synthetic construct
  misc_feature 1..131: note = Description of Artificial Sequence: Synthetic polynucleotide
  source 1..131: mol_type = other RNA
ttggtgactgccacgcccaagttttagagctagaaatagcaagttaaaataaggctagtccgttatcaacttgaaaaagtggcaccgagtcggtgcgccagcagtgaacatcccttgggcgtggcagtttt

SEQ ID NO: 4868 - RNA, 132 nt, synthetic construct
  misc_feature 1..132: note = Description of Artificial Sequence: Synthetic polynucleotide
  source 1..132: mol_type = other RNA
ttggtgactgccacgcccaagttttagagctagaaatagcaagttaaaataaggctagtccgttatcaacttgaaaaagtggcaccgagtcggtgcgcggaggccagcagtgaacaccccttgggcgtggca

SEQ ID NO: 4869 - RNA, 132 nt, synthetic construct
  misc_feature 1..132: note = Description of Artificial Sequence: Synthetic polynucleotide
  source 1..132: mol_type = other RNA
gttggtgactgccacgcccaagttttagagctagaaatagcaagttaaaataaggctagtccgttatcaacttgaaaaagtggcaccgagtcggtgcgcagtgaacaccccttgggcgtggcagtttttttt

SEQ ID NO: 4870 - RNA, 132 nt, synthetic construct
  misc_feature 1..132: note = Description of Artificial Sequence: Synthetic polynucleotide
  source 1..132: mol_type = other RNA
gttggtgactgccacgcccaagttttagagctagaaatagcaagttaaaataaggctagtccgttatcaacttgaaaaagtggcaccgagtcggtgcgtgaacaccccttgggcgtggcagtcacttttttt

SEQ ID NO: 4871 - RNA, 132 nt, synthetic construct
  misc_feature 1..132: note = Description of Artificial Sequence: Synthetic polynucleotide
  source 1..132: mol_type = other RNA
ttggtgactgccacgcccaagttttagagctagaaatagcaagttaaaataaggctagtccgttatcaacttgaaaaagtggcaccgagtcggtgcgaggccagcagtgaacaccccttgggcgtggcagtc

SEQ ID NO: 4872 - RNA, 132 nt, synthetic construct
  misc_feature 1..132: note = Description of Artificial Sequence: Synthetic polynucleotide
  source 1..132: mol_type = other RNA
ttggtgactgccacgcccaagttttagagctagaaatagcaagttaaaataaggctagtccgttatcaacttgaaaaagtggcaccgagtcggtgcgccagcagtgaacatcccttgggcgtggcagttttt

SEQ ID NO: 4873 - RNA, 132 nt, synthetic construct
  misc_feature 1..132: note = Description of Artificial Sequence: Synthetic polynucleotide
  source 1..132: mol_type = other RNA
ttggtgactgccacgcccaagttttagagctagaaatagcaagttaaaataaggctagtccgttatcaacttgaaaaagtggcaccgagtcggtgctgcggaggccagcagtgaacaccccttgggcgtggc

SEQ ID NO: 4874 - RNA, 132 nt, synthetic construct
  misc_feature 1..132: note = Description of Artificial Sequence: Synthetic polynucleotide
  source 1..132: mol_type = other RNA
ttggtgactgccacgcccaagttttagagctagaaatagcaagttaaaataaggctagtccgttatcaacttgaaaaagtggcaccgagtcggtgcgccagcagtgaacatcccttgggcgtggcagtcacc

SEQ ID NO: 4875 - RNA, 132 nt, synthetic construct
  misc_feature 1..132: note = Description of Artificial Sequence: Synthetic polynucleotide
  source 1..132: mol_type = other RNA
ttggtgactgccacgcccaagttttagagctagaaatagcaagttaaaataaggctagtccgttatcaacttgaaaaagtggcaccgagtcggtgcgccagcagtgaacaccccttgggcgtggcagtcacc

SEQ ID NO: 4876 - RNA, 132 nt, synthetic construct
  misc_feature 1..132: note = Description of Artificial Sequence: Synthetic polynucleotide
  source 1..132: mol_type = other RNA
ttggtgactgccacgcccaagttttagagctagaaatagcaagttaaaataaggctagtccgttatcaacttgaaaaagtggcaccgagtcggtgcaggccagcagtgaacaccccttgggcgtggcagtca

SEQ ID NO: 4877 - RNA, 132 nt, synthetic construct
  misc_feature 1..132: note = Description of Artificial Sequence: Synthetic polynucleotide
  source 1..132: mol_type = other RNA
gttggtgactgccacgcccaagttttagagctagaaatagcaagttaaaataaggctagtccgttatcaacttgaaaaagtggcaccgagtcggtgctgaacaccccttgggcgtggcagtcaccatttttt

SEQ ID NO: 4878 - RNA, 132 nt, synthetic construct
  misc_feature 1..132: note = Description of Artificial Sequence: Synthetic polynucleotide
  source 1..132: mol_type = other RNA
gttggtgactgccacgcccaagttttagagctagaaatagcaagttaaaataaggctagtccgttatcaacttgaaaaagtggcaccgagtcggtgcgccagcagtgaacaccccttgggcgtggttttttt

SEQ ID NO: 4879 - RNA, 132 nt, synthetic construct
  misc_feature 1..132: note = Description of Artificial Sequence: Synthetic polynucleotide
  source 1..132: mol_type = other RNA
ttggtgactgccacgcccaagttttagagctagaaatagcaagttaaaataaggctagtccgttatcaacttgaaaaagtggcaccgagtcggtgcgcagtgaacatcccttgggcgtggcagtcacctttt

SEQ ID NO: 4880 - RNA, 132 nt, synthetic construct
  misc_feature 1..132: note = Description of Artificial Sequence: Synthetic polynucleotide
  source 1..132: mol_type = other RNA
ttggtgactgccacgcccaagttttagagctagaaatagcaagttaaaataaggctagtccgttatcaacttgaaaaagtggcaccgagtcggtgcagcagtgaacatcccttgggcgtggcagtcactttt

SEQ ID NO: 4881 - RNA, 132 nt, synthetic construct
  misc_feature 1..132: note = Description of Artificial Sequence: Synthetic polynucleotide
  source 1..132: mol_type = other RNA
gttggtgactgccacgcccaagttttagagctagaaatagcaagttaaaataaggctagtccgttatcaacttgaaaaagtggcaccgagtcggtgcgcagtgaacaccccttgggcgtggcagtctttttt

SEQ ID NO: 4882 - RNA, 132 nt, synthetic construct
  misc_feature 1..132: note = Description of Artificial Sequence: Synthetic polynucleotide
  source 1..132: mol_type = other RNA
ttggtgactgccacgcccaagttttagagctagaaatagcaagttaaaataaggctagtccgttatcaacttgaaaaagtggcaccgagtcggtgcggccagcagtgaacaccccttgggcgtggcagtcac

SEQ ID NO: 4883 - RNA, 132 nt, synthetic construct
  misc_feature 1..132: note = Description of Artificial Sequence: Synthetic polynucleotide
  source 1..132: mol_type = other RNA
gttggtgactgccacgcccaagttttagagctagaaatagcaagttaaaataaggctagtccgttatcaacttgaaaaagtggcaccgagtcggtgcagtgaacaccccttgggcgtggcagtcattttttt

SEQ ID NO: 4884 - RNA, 132 nt, synthetic construct
  misc_feature 1..132: note = Description of Artificial Sequence: Synthetic polynucleotide
  source 1..132: mol_type = other RNA
gttggtgactgccacgcccaagttttagagctagaaatagcaagttaaaataaggctagtccgttatcaacttgaaaaagtggcaccgagtcggtgcagtgaacaccccttgggcgtggcagtcactttttt

SEQ ID NO: 4885 - RNA, 132 nt, synthetic construct
  misc_feature 1..132: note = Description of Artificial Sequence: Synthetic polynucleotide
  source 1..132: mol_type = other RNA
ttggtgactgccacgcccaagttttagagctagaaatagcaagttaaaataaggctagtccgttatcaacttgaaaaagtggcaccgagtcggtgcagtgaacatcccttgggcgtggcagtcaccaatttt

SEQ ID NO: 4886 - RNA, 132 nt, synthetic construct
  misc_feature 1..132: note = Description of Artificial Sequence: Synthetic polynucleotide
  source 1..132: mol_type = other RNA
gttggtgactgccacgcccaagttttagagctagaaatagcaagttaaaataaggctagtccgttatcaacttgaaaaagtggcaccgagtcggtgcagcagtgaacaccccttgggcgtggcagttttttt

SEQ ID NO: 4887 - RNA, 132 nt, synthetic construct
  misc_feature 1..132: note = Description of Artificial Sequence: Synthetic polynucleotide
  source 1..132: mol_type = other RNA
ttggtgactgccacgcccaagttttagagctagaaatagcaagttaaaataaggctagtccgttatcaacttgaaaaagtggcaccgagtcggtgcggaggccagcagtgaacaccccttgggcgtggcagt

SEQ ID NO: 4888 - RNA, 133 nt, synthetic construct
  misc_feature 1..133: note = Description of Artificial Sequence: Synthetic polynucleotide
  source 1..133: mol_type = other RNA
gttggtgactgccacgcccaagttttagagctagaaatagcaagttaaaataaggctagtccgttatcaacttgaaaaagtggcaccgagtcggtgcgtgaacaccccttgggcgtggcagtcaccatttttt

SEQ ID NO: 4889 - RNA, 133 nt, synthetic construct
  misc_feature 1..133: note = Description of Artificial Sequence: Synthetic polynucleotide
  source 1..133: mol_type = other RNA
ttggtgactgccacgcccaagttttagagctagaaatagcaagttaaaataaggctagtccgttatcaacttgaaaaagtggcaccgagtcggtgcactgcggaggccagcagtgaacaccccttgggcgtgg

SEQ ID NO: 4890 - RNA, 133 nt, synthetic construct
  misc_feature 1..133: note = Description of Artificial Sequence: Synthetic polynucleotide
  source 1..133: mol_type = other RNA
gttggtgactgccacgcccaagttttagagctagaaatagcaagttaaaataaggctagtccgttatcaacttgaaaaagtggcaccgagtcggtgcgcagtgaacaccccttgggcgtggcagtcttttttt

SEQ ID NO: 4891 - RNA, 133 nt, synthetic construct
  misc_feature 1..133: note = Description of Artificial Sequence: Synthetic polynucleotide
  source 1..133: mol_type = other RNA
ttggtgactgccacgcccaagttttagagctagaaatagcaagttaaaataaggctagtccgttatcaacttgaaaaagtggcaccgagtcggtgcgcagtgaacatcccttgggcgtggcagtcaccatttt

SEQ ID NO: 4892 - RNA, 133 nt, synthetic construct
  misc_feature 1..133: note = Description of Artificial Sequence: Synthetic polynucleotide
  source 1..133: mol_type = other RNA
ttggtgactgccacgcccaagttttagagctagaaatagcaagttaaaataaggctagtccgttatcaacttgaaaaagtggcaccgagtcggtgcagcagtgaacatcccttgggcgtggcagtcacctttt

SEQ ID NO: 4893 - RNA, 133 nt, synthetic construct
  misc_feature 1..133: note = Description of Artificial Sequence: Synthetic polynucleotide
  source 1..133: mol_type = other RNA
ttggtgactgccacgcccaagttttagagctagaaatagcaagttaaaataaggctagtccgttatcaacttgaaaaagtggcaccgagtcggtgcgccagcagtgaacaccccttgggcgtggcagtcacca

SEQ ID NO: 4894 - RNA, 133 nt, synthetic construct
  misc_feature 1..133: note = Description of Artificial Sequence: Synthetic polynucleotide
  source 1..133: mol_type = other RNA
gttggtgactgccacgcccaagttttagagctagaaatagcaagttaaaataaggctagtccgttatcaacttgaaaaagtggcaccgagtcggtgcggccagcagtgaacaccccttgggcgtggttttttt

SEQ ID NO: 4895 - RNA, 133 nt, synthetic construct
  misc_feature 1..133: note = Description of Artificial Sequence: Synthetic polynucleotide
  source 1..133: mol_type = other RNA
ttggtgactgccacgcccaagttttagagctagaaatagcaagttaaaataaggctagtccgttatcaacttgaaaaagtggcaccgagtcggtgcggaggccagcagtgaacaccccttgggcgtggcagtc

SEQ ID NO: 4896 - RNA, 133 nt, synthetic construct
  misc_feature 1..133: note = Description of Artificial Sequence: Synthetic polynucleotide
  source 1..133: mol_type = other RNA
ttggtgactgccacgcccaagttttagagctagaaatagcaagttaaaataaggctagtccgttatcaacttgaaaaagtggcaccgagtcggtgcaggccagcagtgaacaccccttgggcgtggcagtcac

SEQ ID NO: 4897 - RNA, 133 nt, synthetic construct
  misc_feature 1..133: note = Description of Artificial Sequence: Synthetic polynucleotide
  source 1..133: mol_type = other RNA
gttggtgactgccacgcccaagttttagagctagaaatagcaagttaaaataaggctagtccgttatcaacttgaaaaagtggcaccgagtcggtgcagcagtgaacaccccttgggcgtggcagtctttttt

SEQ ID NO: 4898 - RNA, 133 nt, synthetic construct
  misc_feature 1..133: note = Description of Artificial Sequence: Synthetic polynucleotide
  source 1..133: mol_type = other RNA
ttggtgactgccacgcccaagttttagagctagaaatagcaagttaaaataaggctagtccgttatcaacttgaaaaagtggcaccgagtcggtgctgcggaggccagcagtgaacaccccttgggcgtggca

SEQ ID NO: 4899 - RNA, 133 nt, synthetic construct
  misc_feature 1..133: note = Description of Artificial Sequence: Synthetic polynucleotide
  source 1..133: mol_type = other RNA
gttggtgactgccacgcccaagttttagagctagaaatagcaagttaaaataaggctagtccgttatcaacttgaaaaagtggcaccgagtcggtgcgccagcagtgaacaccccttgggcgtggcttttttt

SEQ ID NO: 4900 - RNA, 133 nt, synthetic construct
  misc_feature 1..133: note = Description of Artificial Sequence: Synthetic polynucleotide
  source 1..133: mol_type = other RNA
ttggtgactgccacgcccaagttttagagctagaaatagcaagttaaaataaggctagtccgttatcaacttgaaaaagtggcaccgagtcggtgcgccagcagtgaacatcccttgggcgtggcagtctttt

SEQ ID NO: 4901 - RNA, 133 nt, synthetic construct
  misc_feature 1..133: note = Description of Artificial Sequence: Synthetic polynucleotide
  source 1..133: mol_type = other RNA
gttggtgactgccacgcccaagttttagagctagaaatagcaagttaaaataaggctagtccgttatcaacttgaaaaagtggcaccgagtcggtgcagtgaacaccccttgggcgtggcagtcacttttttt

SEQ ID NO: 4902 - RNA, 133 nt, synthetic construct
  misc_feature 1..133: note = Description of Artificial Sequence: Synthetic polynucleotide
  source 1..133: mol_type = other RNA
ttggtgactgccacgcccaagttttagagctagaaatagcaagttaaaataaggctagtccgttatcaacttgaaaaagtggcaccgagtcggtgcgccagcagtgaacatcccttgggcgtggcagtcacca

SEQ ID NO: 4903 - RNA, 133 nt, synthetic construct
  misc_feature 1..133: note = Description of Artificial Sequence: Synthetic polynucleotide
  source 1..133: mol_type = other RNA
gttggtgactgccacgcccaagttttagagctagaaatagcaagttaaaataaggctagtccgttatcaacttgaaaaagtggcaccgagtcggtgcagcagtgaacaccccttgggcgtggcagtttttttt

SEQ ID NO: 4904 - RNA, 133 nt, synthetic construct
  misc_feature 1..133: note = Description of Artificial Sequence: Synthetic polynucleotide
  source 1..133: mol_type = other RNA
ttggtgactgccacgcccaagttttagagctagaaatagcaagttaaaataaggctagtccgttatcaacttgaaaaagtggcaccgagtcggtgcgaggccagcagtgaacaccccttgggcgtggcagtca

SEQ ID NO: 4905 - RNA, 133 nt, synthetic construct
  misc_feature 1..133: note = Description of Artificial Sequence: Synthetic polynucleotide
  source 1..133: mol_type = other RNA
ttggtgactgccacgcccaagttttagagctagaaatagcaagttaaaataaggctagtccgttatcaacttgaaaaagtggcaccgagtcggtgcgcggaggccagcagtgaacaccccttgggcgtggcag

SEQ ID NO: 4906 - RNA, 134 nt, synthetic construct
  misc_feature 1..134: note = Description of Artificial Sequence: Synthetic polynucleotide
  source 1..134: mol_type = other RNA
gttggtgactgccacgcccaagttttagagctagaaatagcaagttaaaataaggctagtccgttatcaacttgaaaaagtggcaccgagtcggtgcaggccagcagtgaacaccccttgggcgtggttttttt

SEQ ID NO: 4907 - RNA, 134 nt, synthetic construct
  misc_feature 1..134: note = Description of Artificial Sequence: Synthetic polynucleotide
  source 1..134: mol_type = other RNA
ttggtgactgccacgcccaagttttagagctagaaatagcaagttaaaataaggctagtccgttatcaacttgaaaaagtggcaccgagtcggtgcactgcggaggccagcagtgaacaccccttgggcgtggc

SEQ ID NO: 4908 - RNA, 134 nt, synthetic construct
  misc_feature 1..134: note = Description of Artificial Sequence: Synthetic polynucleotide
  source 1..134: mol_type = other RNA
ttggtgactgccacgcccaagttttagagctagaaatagcaagttaaaataaggctagtccgttatcaacttgaaaaagtggcaccgagtcggtgcgaggccagcagtgaacaccccttgggcgtggcagtcac

SEQ ID NO: 4909 - RNA, 134 nt, synthetic construct
  misc_feature 1..134: note = Description of Artificial Sequence: Synthetic polynucleotide
  source 1..134: mol_type = other RNA
ttggtgactgccacgcccaagttttagagctagaaatagcaagttaaaataaggctagtccgttatcaacttgaaaaagtggcaccgagtcggtgcgactgcggaggccagcagtgaacaccccttgggcgtgg

SEQ ID NO: 4910 - RNA, 134 nt, synthetic construct
  misc_feature 1..134: note = Description of Artificial Sequence: Synthetic polynucleotide
  source 1..134: mol_type = other RNA
ttggtgactgccacgcccaagttttagagctagaaatagcaagttaaaataaggctagtccgttatcaacttgaaaaagtggcaccgagtcggtgcgccagcagtgaacatcccttgggcgtggcagtcatttt

SEQ ID NO: 4911 - RNA, 134 nt, synthetic construct
  misc_feature 1..134: note = Description of Artificial Sequence: Synthetic polynucleotide
  source 1..134: mol_type = other RNA
ttggtgactgccacgcccaagttttagagctagaaatagcaagttaaaataaggctagtccgttatcaacttgaaaaagtggcaccgagtcggtgcagcagtgaacatcccttgggcgtggcagtcaccatttt

SEQ ID NO: 4912 - RNA, 134 nt, synthetic construct
  misc_feature 1..134: note = Description of Artificial Sequence: Synthetic polynucleotide
  source 1..134: mol_type = other RNA
ttggtgactgccacgcccaagttttagagctagaaatagcaagttaaaataaggctagtccgttatcaacttgaaaaagtggcaccgagtcggtgcgccagcagtgaacaccccttgggcgtggcagtcaccaa

SEQ ID NO: 4913 - RNA, 134 nt, synthetic construct
  misc_feature 1..134: note = Description of Artificial Sequence: Synthetic polynucleotide
  source 1..134: mol_type = other RNA
ttggtgactgccacgcccaagttttagagctagaaatagcaagttaaaataaggctagtccgttatcaacttgaaaaagtggcaccgagtcggtgccggaggccagcagtgaacaccccttgggcgtggcagtc

SEQ ID NO: 4914 - RNA, 134 nt, synthetic construct
  misc_feature 1..134: note = Description of Artificial Sequence: Synthetic polynucleotide
  source 1..134: mol_type = other RNA
gttggtgactgccacgcccaagttttagagctagaaatagcaagttaaaataaggctagtccgttatcaacttgaaaaagtggcaccgagtcggtgcgccagcagtgaacaccccttgggcgtggcattttttt

SEQ ID NO: 4915 - RNA, 134 nt, synthetic construct
  misc_feature 1..134: note = Description of Artificial Sequence: Synthetic polynucleotide
  source 1..134: mol_type = other RNA
ttggtgactgccacgcccaagttttagagctagaaatagcaagttaaaataaggctagtccgttatcaacttgaaaaagtggcaccgagtcggtgcgccagcagtgaacatcccttgggcgtggcagtcaccaa

SEQ ID NO: 4916 - RNA, 134 nt, synthetic construct
  misc_feature 1..134: note = Description of Artificial Sequence: Synthetic polynucleotide
  source 1..134: mol_type = other RNA
gttggtgactgccacgcccaagttttagagctagaaatagcaagttaaaataaggctagtccgttatcaacttgaaaaagtggcaccgagtcggtgcagtgaacaccccttgggcgtggcagtcaccatttttt

SEQ ID NO: 4917 - RNA, 134 nt, synthetic construct
  misc_feature 1..134: note = Description of Artificial Sequence: Synthetic polynucleotide
  source 1..134: mol_type = other RNA
gttggtgactgccacgcccaagttttagagctagaaatagcaagttaaaataaggctagtccgttatcaacttgaaaaagtggcaccgagtcggtgcagcagtgaacaccccttgggcgtggcagtcttttttt

SEQ ID NO: 4918 - RNA, 134 nt, synthetic construct
  misc_feature 1..134: note = Description of Artificial Sequence: Synthetic polynucleotide
  source 1..134: mol_type = other RNA
gttggtgactgccacgcccaagttttagagctagaaatagcaagttaaaataaggctagtccgttatcaacttgaaaaagtggcaccgagtcggtgcgccagcagtgaacaccccttgggcgtggcagtttttt

SEQ ID NO: 4919 - RNA, 134 nt, synthetic construct
  misc_feature 1..134: note = Description of Artificial Sequence: Synthetic polynucleotide
  source 1..134: mol_type = other RNA
ttggtgactgccacgcccaagttttagagctagaaatagcaagttaaaataaggctagtccgttatcaacttgaaaaagtggcaccgagtcggtgcgcagtgaacatcccttgggcgtggcagtcaccaatttt

SEQ ID NO: 4920 - RNA, 134 nt, synthetic construct
  misc_feature 1..134: note = Description of Artificial Sequence: Synthetic polynucleotide
  source 1..134: mol_type = other RNA
gttggtgactgccacgcccaagttttagagctagaaatagcaagttaaaataaggctagtccgttatcaacttgaaaaagtggcaccgagtcggtgcgcagtgaacaccccttgggcgtggcagtcattttttt

SEQ ID NO: 4921 - RNA, 134 nt, synthetic construct
  misc_feature 1..134: note = Description of Artificial Sequence: Synthetic polynucleotide
  source 1..134: mol_type = other RNA
gttggtgactgccacgcccaagttttagagctagaaatagcaagttaaaataaggctagtccgttatcaacttgaaaaagtggcaccgagtcggtgcgcagtgaacaccccttgggcgtggcagtcactttttt

SEQ ID NO: 4922 - RNA, 134 nt, synthetic construct
  misc_feature 1..134: note = Description of Artificial Sequence: Synthetic polynucleotide
  source 1..134: mol_type = other RNA
ttggtgactgccacgcccaagttttagagctagaaatagcaagttaaaataaggctagtccgttatcaacttgaaaaagtggcaccgagtcggtgcgcggaggccagcagtgaacaccccttgggcgtggcagt

SEQ ID NO: 4923 - RNA, 134 nt, synthetic construct
  misc_feature 1..134: note = Description of Artificial Sequence: Synthetic polynucleotide
  source 1..134: mol_type = other RNA
ttggtgactgccacgcccaagttttagagctagaaatagcaagttaaaataaggctagtccgttatcaacttgaaaaagtggcaccgagtcggtgcggaggccagcagtgaacaccccttgggcgtggcagtca

SEQ ID NO: 4924 - RNA, 134 nt, synthetic construct
  misc_feature 1..134: note = Description of Artificial Sequence: Synthetic polynucleotide
  source 1..134: mol_type = other RNA
ttggtgactgccacgcccaagttttagagctagaaatagcaagttaaaataaggctagtccgttatcaacttgaaaaagtggcaccgagtcggtgctgcggaggccagcagtgaacaccccttgggcgtggcag

SEQ ID NO: 4925 - RNA, 134 nt, synthetic construct
  misc_feature 1..134: note = Description of Artificial Sequence: Synthetic polynucleotide
  source 1..134: mol_type = other RNA
gttggtgactgccacgcccaagttttagagctagaaatagcaagttaaaataaggctagtccgttatcaacttgaaaaagtggcaccgagtcggtgcggccagcagtgaacaccccttgggcgtggcttttttt

SEQ ID NO: 4926 - RNA, 135 nt, synthetic construct
  misc_feature 1..135: note = Description of Artificial Sequence: Synthetic polynucleotide
  source 1..135: mol_type = other RNA
ttggtgactgccacgcccaagttttagagctagaaatagcaagttaaaataaggctagtccgttatcaacttgaaaaagtggcaccgagtcggtgcgccagcagtgaacatcccttgggcgtggcagtcactttt

SEQ ID NO: 4927 - RNA, 135 nt, synthetic construct
  misc_feature 1..135: note = Description of Artificial Sequence: Synthetic polynucleotide
  source 1..135: mol_type = other RNA
gttggtgactgccacgcccaagttttagagctagaaatagcaagttaaaataaggctagtccgttatcaacttgaaaaagtggcaccgagtcggtgcgcagtgaacaccccttgggcgtggcagtcacttttttt

SEQ ID NO: 4928 - RNA, 135 nt, synthetic construct
  misc_feature 1..135: note = Description of Artificial Sequence: Synthetic polynucleotide
  source 1..135: mol_type = other RNA
ttggtgactgccacgcccaagttttagagctagaaatagcaagttaaaataaggctagtccgttatcaacttgaaaaagtggcaccgagtcggtgcagcagtgaacatcccttgggcgtggcagtcaccaatttt

SEQ ID NO: 4929 - RNA, 135 nt, synthetic construct
  misc_feature 1..135: note = Description of Artificial Sequence: Synthetic polynucleotide
  source 1..135: mol_type = other RNA
gttggtgactgccacgcccaagttttagagctagaaatagcaagttaaaataaggctagtccgttatcaacttgaaaaagtggcaccgagtcggtgcaggccagcagtgaacaccccttgggcgtggcttttttt

SEQ ID NO: 4930 - RNA, 135 nt, synthetic construct
  misc_feature 1..135: note = Description of Artificial Sequence: Synthetic polynucleotide
  source 1..135: mol_type = other RNA
gttggtgactgccacgcccaagttttagagctagaaatagcaagttaaaataaggctagtccgttatcaacttgaaaaagtggcaccgagtcggtgcggccagcagtgaacaccccttgggcgtggcattttttt

SEQ ID NO: 4931 - RNA, 135 nt, synthetic construct
  misc_feature 1..135: note = Description of Artificial Sequence: Synthetic polynucleotide
  source 1..135: mol_type = other RNA
gttggtgactgccacgcccaagttttagagctagaaatagcaagttaaaataaggctagtccgttatcaacttgaaaaagtggcaccgagtcggtgcgaggccagcagtgaacaccccttgggcgtggttttttt

SEQ ID NO: 4932 - RNA, 135 nt, synthetic construct
  misc_feature 1..135: note = Description of Artificial Sequence: Synthetic polynucleotide
  source 1..135: mol_type = other RNA
ttggtgactgccacgcccaagttttagagctagaaatagcaagttaaaataaggctagtccgttatcaacttgaaaaagtggcaccgagtcggtgcgactgcggaggccagcagtgaacaccccttgggcgtggc

SEQ ID NO: 4933 - RNA, 135 nt, synthetic construct
  misc_feature 1..135: note = Description of Artificial Sequence: Synthetic polynucleotide
  source 1..135: mol_type = other RNA
gttggtgactgccacgcccaagttttagagctagaaatagcaagttaaaataaggctagtccgttatcaacttgaaaaagtggcaccgagtcggtgcagcagtgaacaccccttgggcgtggcagtcattttttt

SEQ ID NO: 4934 - RNA, 135 nt, synthetic construct
  misc_feature 1..135: note = Description of Artificial Sequence: Synthetic polynucleotide
  source 1..135: mol_type = other RNA
ttggtgactgccacgcccaagttttagagctagaaatagcaagttaaaataaggctagtccgttatcaacttgaaaaagtggcaccgagtcggtgcggactgcggaggccagcagtgaacaccccttgggcgtgg

SEQ ID NO: 4935 - RNA, 135 nt, synthetic construct
  misc_feature 1..135: note = Description of Artificial Sequence: Synthetic polynucleotide
  source 1..135: mol_type = other RNA
ttggtgactgccacgcccaagttttagagctagaaatagcaagttaaaataaggctagtccgttatcaacttgaaaaagtggcaccgagtcggtgcggaggccagcagtgaacaccccttgggcgtggcagtcac

SEQ ID NO: 4936 - RNA, 135 nt, synthetic construct
  misc_feature 1..135: note = Description of Artificial Sequence: Synthetic polynucleotide
  source 1..135: mol_type = other RNA
ttggtgactgccacgcccaagttttagagctagaaatagcaagttaaaataaggctagtccgttatcaacttgaaaaagtggcaccgagtcggtgctgcggaggccagcagtgaacaccccttgggcgtggcagt

SEQ ID NO: 4937 - RNA, 135 nt, synthetic construct
  misc_feature 1..135: note = Description of Artificial Sequence: Synthetic polynucleotide
  source 1..135: mol_type = other RNA
ttggtgactgccacgcccaagttttagagctagaaatagcaagttaaaataaggctagtccgttatcaacttgaaaaagtggcaccgagtcggtgcgcggaggccagcagtgaacaccccttgggcgtggcagtc

SEQ ID NO: 4938 - RNA, 135 nt, synthetic construct
  misc_feature 1..135: note = Description of Artificial Sequence: Synthetic polynucleotide
  source 1..135: mol_type = other RNA
gttggtgactgccacgcccaagttttagagctagaaatagcaagttaaaataaggctagtccgttatcaacttgaaaaagtggcaccgagtcggtgcgccagcagtgaacaccccttgggcgtggcagttttttt

SEQ ID NO: 4939 - RNA, 135 nt, synthetic construct
  misc_feature 1..135: note = Description of Artificial Sequence: Synthetic polynucleotide
  source 1..135: mol_type = other RNA
ttggtgactgccacgcccaagttttagagctagaaatagcaagttaaaataaggctagtccgttatcaacttgaaaaagtggcaccgagtcggtgcactgcggaggccagcagtgaacaccccttgggcgtggca

SEQ ID NO: 4940 - RNA, 135 nt, synthetic construct
  misc_feature 1..135: note = Description of Artificial Sequence: Synthetic polynucleotide
  source 1..135: mol_type = other RNA
gttggtgactgccacgcccaagttttagagctagaaatagcaagttaaaataaggctagtccgttatcaacttgaaaaagtggcaccgagtcggtgcagcagtgaacaccccttgggcgtggcagtcactttttt

SEQ ID NO: 4941 - RNA, 136 nt, synthetic construct
  misc_feature 1..136: note = Description of Artificial Sequence: Synthetic polynucleotide
  source 1..136: mol_type = other RNA
gttggtgactgccacgcccaagttttagagctagaaatagcaagttaaaataaggctagtccgttatcaacttgaaaaagtggcaccgagtcggtgcgccagcagtgaacaccccttgggcgtggcagtctttttt

SEQ ID NO: 4942 - RNA, 136 nt, synthetic construct
  misc_feature 1..136: note = Description of Artificial Sequence: Synthetic polynucleotide
  source 1..136: mol_type = other RNA
gttggtgactgccacgcccaagttttagagctagaaatagcaagttaaaataaggctagtccgttatcaacttgaaaaagtggcaccgagtcggtgcgaggccagcagtgaacaccccttgggcgtggcttttttt

SEQ ID NO: 4943 - RNA, 136 nt, synthetic construct
  misc_feature 1..136: note = Description of Artificial Sequence: Synthetic polynucleotide
  source 1..136: mol_type = other RNA
gttggtgactgccacgcccaagttttagagctagaaatagcaagttaaaataaggctagtccgttatcaacttgaaaaagtggcaccgagtcggtgcaggccagcagtgaacaccccttgggcgtggcattttttt

SEQ ID NO: 4944 - RNA, 136 nt, synthetic construct
  misc_feature 1..136: note = Description of Artificial Sequence: Synthetic polynucleotide
  source 1..136: mol_type = other RNA
gttggtgactgccacgcccaagttttagagctagaaatagcaagttaaaataaggctagtccgttatcaacttgaaaaagtggcaccgagtcggtgcgccagcagtgaacaccccttgggcgtggcagtttttttt

SEQ ID NO: 4945 - RNA, 136 nt, synthetic construct
  misc_feature 1..136: note = Description of Artificial Sequence: Synthetic polynucleotide
  source 1..136: mol_type = other RNA
gttggtgactgccacgcccaagttttagagctagaaatagcaagttaaaataaggctagtccgttatcaacttgaaaaagtggcaccgagtcggtgcagcagtgaacaccccttgggcgtggcagtcacttttttt

SEQ ID NO: 4946 - RNA, 136 nt, synthetic construct
  misc_feature 1..136: note = Description of Artificial Sequence: Synthetic polynucleotide
  source 1..136: mol_type = other RNA
ttggtgactgccacgcccaagttttagagctagaaatagcaagttaaaataaggctagtccgttatcaacttgaaaaagtggcaccgagtcggtgcgccagcagtgaacatcccttgggcgtggcagtcacctttt

SEQ ID NO: 4947 - RNA, 136 nt, synthetic construct
  misc_feature 1..136: note = Description of Artificial Sequence: Synthetic polynucleotide
  source 1..136: mol_type = other RNA
ttggtgactgccacgcccaagttttagagctagaaatagcaagttaaaataaggctagtccgttatcaacttgaaaaagtggcaccgagtcggtgcgggactgcggaggccagcagtgaacaccccttgggcgtgg

SEQ ID NO: 4948 - RNA, 136 nt, synthetic construct
  misc_feature 1..136: note = Description of Artificial Sequence: Synthetic polynucleotide
  source 1..136: mol_type = other RNA
gttggtgactgccacgcccaagttttagagctagaaatagcaagttaaaataaggctagtccgttatcaacttgaaaaagtggcaccgagtcggtgcgcagtgaacaccccttgggcgtggcagtcaccatttttt

SEQ ID NO: 4949 - RNA, 136 nt, synthetic construct
  misc_feature 1..136: note = Description of Artificial Sequence: Synthetic polynucleotide
  source 1..136: mol_type = other RNA
ttggtgactgccacgcccaagttttagagctagaaatagcaagttaaaataaggctagtccgttatcaacttgaaaaagtggcaccgagtcggtgcggactgcggaggccagcagtgaacaccccttgggcgtggc

SEQ ID NO: 4950 - RNA, 136 nt, synthetic construct
  misc_feature 1..136: note = Description of Artificial Sequence: Synthetic polynucleotide
  source 1..136: mol_type = other RNA
ttggtgactgccacgcccaagttttagagctagaaatagcaagttaaaataaggctagtccgttatcaacttgaaaaagtggcaccgagtcggtgcgactgcggaggccagcagtgaacaccccttgggcgtggca

SEQ ID NO: 4951 - RNA, 136 nt, synthetic construct
  misc_feature 1..136: note = Description of Artificial Sequence: Synthetic polynucleotide
  source 1..136: mol_type = other RNA
ttggtgactgccacgcccaagttttagagctagaaatagcaagttaaaataaggctagtccgttatcaacttgaaaaagtggcaccgagtcggtgctgcggaggccagcagtgaacaccccttgggcgtggcagtc

SEQ ID NO: 4952 - RNA, 136 nt, synthetic construct
  misc_feature 1..136: note = Description of Artificial Sequence: Synthetic polynucleotide
  source 1..136: mol_type = other RNA
gttggtgactgccacgcccaagttttagagctagaaatagcaagttaaaataaggctagtccgttatcaacttgaaaaagtggcaccgagtcggtgcggccagcagtgaacaccccttgggcgtggcagttttttt

SEQ ID NO: 4953 - RNA, 136 nt, synthetic construct
  misc_feature 1..136: note = Description of Artificial Sequence: Synthetic polynucleotide
  source 1..136: mol_type = other RNA
gttggtgactgccacgcccaagttttagagctagaaatagcaagttaaaataaggctagtccgttatcaacttgaaaaagtggcaccgagtcggtgcggaggccagcagtgaacaccccttgggcgtggttttttt

SEQ ID NO: 4954 - RNA, 136 nt, synthetic construct
  misc_feature 1..136: note = Description of Artificial Sequence: Synthetic polynucleotide
  source 1..136: mol_type = other RNA
ttggtgactgccacgcccaagttttagagctagaaatagcaagttaaaataaggctagtccgttatcaacttgaaaaagtggcaccgagtcggtgcactgcggaggccagcagtgaacaccccttgggcgtggcag

SEQ ID NO: 4955 - RNA, 136 nt, synthetic construct
  misc_feature 1..136: note = Description of Artificial Sequence: Synthetic polynucleotide
  source 1..136: mol_type = other RNA
ttggtgactgccacgcccaagttttagagctagaaatagcaagttaaaataaggctagtccgttatcaacttgaaaaagtggcaccgagtcggtgcgcggaggccagcagtgaacaccccttgggcgtggcagtca

SEQ ID NO: 4956 - RNA, 137 nt, synthetic construct
  misc_feature 1..137: note = Description of Artificial Sequence: Synthetic polynucleotide
  source 1..137: mol_type = other RNA
ttggtgactgccacgcccaagttttagagctagaaatagcaagttaaaataaggctagtccgttatcaacttgaaaaagtggcaccgagtcggtgcgcggaggccagcagtgaacaccccttgggcgtggcagtcac

SEQ ID NO: 4957 - RNA, 137 nt, synthetic construct
  misc_feature 1..137: note = Description of Artificial Sequence: Synthetic polynucleotide
  source 1..137: mol_type = other RNA
ttggtgactgccacgcccaagttttagagctagaaatagcaagttaaaataaggctagtccgttatcaacttgaaaaagtggcaccgagtcggtgcactgcggaggccagcagtgaacaccccttgggcgtggcagt

SEQ ID NO: 4958 - RNA, 137 nt, synthetic construct
  misc_feature 1..137: note = Description of Artificial Sequence: Synthetic polynucleotide
  source 1..137: mol_type = other RNA
ttggtgactgccacgcccaagttttagagctagaaatagcaagttaaaataaggctagtccgttatcaacttgaaaaagtggcaccgagtcggtgcggggactgcggaggccagcagtgaacaccccttgggcgtgg

SEQ ID NO: 4959 - RNA, 137 nt, synthetic construct
  misc_feature 1..137: note = Description of Artificial Sequence: Synthetic polynucleotide
  source 1..137: mol_type = other RNA
ttggtgactgccacgcccaagttttagagctagaaatagcaagttaaaataaggctagtccgttatcaacttgaaaaagtggcaccgagtcggtgctgcggaggccagcagtgaacaccccttgggcgtggcagtca

SEQ ID NO: 4960 - RNA, 137 nt, synthetic construct
  misc_feature 1..137: note = Description of Artificial Sequence: Synthetic polynucleotide
  source 1..137: mol_type = other RNA
gttggtgactgccacgcccaagttttagagctagaaatagcaagttaaaataaggctagtccgttatcaacttgaaaaagtggcaccgagtcggtgcgccagcagtgaacaccccttgggcgtggcagtcttttttt

SEQ ID NO: 4961 - RNA, 137 nt, synthetic construct
  misc_feature 1..137: note = Description of Artificial Sequence: Synthetic polynucleotide
  source 1..137: mol_type = other RNA
ttggtgactgccacgcccaagttttagagctagaaatagcaagttaaaataaggctagtccgttatcaacttgaaaaagtggcaccgagtcggtgcgggactgcggaggccagcagtgaacaccccttgggcgtggc

SEQ ID NO: 4962 - RNA, 137 nt, synthetic construct
  misc_feature 1..137: note = Description of Artificial Sequence: Synthetic polynucleotide
  source 1..137: mol_type = other RNA
gttggtgactgccacgcccaagttttagagctagaaatagcaagttaaaataaggctagtccgttatcaacttgaaaaagtggcaccgagtcggtgcggccagcagtgaacaccccttgggcgtggcagtttttttt

SEQ ID NO: 4963 - RNA, 137 nt, synthetic construct
  misc_feature 1..137: note = Description of Artificial Sequence: Synthetic polynucleotide
  source 1..137: mol_type = other RNA
ttggtgactgccacgcccaagttttagagctagaaatagcaagttaaaataaggctagtccgttatcaacttgaaaaagtggcaccgagtcggtgcggactgcggaggccagcagtgaacaccccttgggcgtggca

SEQ ID NO: 4964 - RNA, 137 nt, synthetic construct
  misc_feature 1..137: note = Description of Artificial Sequence: Synthetic polynucleotide
  source 1..137: mol_type = other RNA
gttggtgactgccacgcccaagttttagagctagaaatagcaagttaaaataaggctagtccgttatcaacttgaaaaagtggcaccgagtcggtgcggaggccagcagtgaacaccccttgggcgtggcttttttt

SEQ ID NO: 4965 - RNA, 137 nt, synthetic construct
  misc_feature 1..137: note = Description of Artificial Sequence: Synthetic polynucleotide
  source 1..137: mol_type = other RNA
gttggtgactgccacgcccaagttttagagctagaaatagcaagttaaaataaggctagtccgttatcaacttgaaaaagtggcaccgagtcggtgcaggccagcagtgaacaccccttgggcgtggcagttttttt

SEQ ID NO: 4966 - RNA, 137 nt, synthetic construct
  misc_feature 1..137: note = Description of Artificial Sequence: Synthetic polynucleotide
  source 1..137: mol_type = other RNA
gttggtgactgccacgcccaagttttagagctagaaatagcaagttaaaataaggctagtccgttatcaacttgaaaaagtggcaccgagtcggtgcgaggccagcagtgaacaccccttgggcgtggcattttttt

SEQ ID NO: 4967 - RNA, 137 nt, synthetic construct
  misc_feature 1..137: note = Description of Artificial Sequence: Synthetic polynucleotide
  source 1..137: mol_type = other RNA
ttggtgactgccacgcccaagttttagagctagaaatagcaagttaaaataaggctagtccgttatcaacttgaaaaagtggcaccgagtcggtgcgccagcagtgaacatcccttgggcgtggcagtcaccatttt

SEQ ID NO: 4968 - RNA, 137 nt, synthetic construct
  misc_feature 1..137: note = Description of Artificial Sequence: Synthetic polynucleotide
  source 1..137: mol_type = other RNA
gttggtgactgccacgcccaagttttagagctagaaatagcaagttaaaataaggctagtccgttatcaacttgaaaaagtggcaccgagtcggtgcagcagtgaacaccccttgggcgtggcagtcaccatttttt

SEQ ID NO: 4969 - RNA, 137 nt, synthetic construct
  misc_feature 1..137: note = Description of Artificial Sequence: Synthetic polynucleotide
  source 1..137: mol_type = other RNA
ttggtgactgccacgcccaagttttagagctagaaatagcaagttaaaataaggctagtccgttatcaacttgaaaaagtggcaccgagtcggtgcgactgcggaggccagcagtgaacaccccttgggcgtggcag

SEQ ID NO: 4970 - RNA, 138 nt, synthetic construct
  misc_feature 1..138: note = Description of Artificial Sequence: Synthetic polynucleotide
  source 1..138: mol_type = other RNA
ttggtgactgccacgcccaagttttagagctagaaatagcaagttaaaataaggctagtccgttatcaacttgaaaaagtggcaccgagtcggtgcactgcggaggccagcagtgaacaccccttgggcgtggcagtc

SEQ ID NO: 4971 - RNA, 138 nt, synthetic construct
  misc_feature 1..138: note = Description of Artificial Sequence: Synthetic polynucleotide
  source 1..138: mol_type = other RNA
ttggtgactgccacgcccaagttttagagctagaaatagcaagttaaaataaggctagtccgttatcaacttgaaaaagtggcaccgagtcggtgcggggactgcggaggccagcagtgaacaccccttgggcgtggc

SEQ ID NO: 4972 - RNA, 138 nt, synthetic construct
  misc_feature 1..138: note = Description of Artificial Sequence: Synthetic polynucleotide
  source 1..138: mol_type = other RNA
ttggtgactgccacgcccaagttttagagctagaaatagcaagttaaaataaggctagtccgttatcaacttgaaaaagtggcaccgagtcggtgctggggactgcggaggccagcagtgaacaccccttgggcgtgg

SEQ ID NO: 4973 - RNA, 138 nt, synthetic construct
  misc_feature 1..138: note = Description of Artificial Sequence: Synthetic polynucleotide
  source 1..138: mol_type = other RNA
gttggtgactgccacgcccaagttttagagctagaaatagcaagttaaaataaggctagtccgttatcaacttgaaaaagtggcaccgagtcggtgcgcggaggccagcagtgaacaccccttgggcgtggttttttt

SEQ ID NO: 4974 - RNA, 138 nt, synthetic construct
  misc_feature 1..138: note = Description of Artificial Sequence: Synthetic polynucleotide
  source 1..138: mol_type = other RNA
gttggtgactgccacgcccaagttttagagctagaaatagcaagttaaaataaggctagtccgttatcaacttgaaaaagtggcaccgagtcggtgcgccagcagtgaacaccccttgggcgtggcagtcattttttt

SEQ ID NO: 4975 - RNA, 138 nt, synthetic construct
  misc_feature 1..138: note = Description of Artificial Sequence: Synthetic polynucleotide
  source 1..138: mol_type = other RNA
gttggtgactgccacgcccaagttttagagctagaaatagcaagttaaaataaggctagtccgttatcaacttgaaaaagtggcaccgagtcggtgcaggccagcagtgaacaccccttgggcgtggcagtttttttt

SEQ ID NO: 4976 - RNA, 138 nt, synthetic construct
  misc_feature 1..138: note = Description of Artificial Sequence: Synthetic polynucleotide
  source 1..138: mol_type = other RNA
ttggtgactgccacgcccaagttttagagctagaaatagcaagttaaaataaggctagtccgttatcaacttgaaaaagtggcaccgagtcggtgcgggactgcggaggccagcagtgaacaccccttgggcgtggca

SEQ ID NO: 4977 - RNA, 138 nt, synthetic construct
  misc_feature 1..138: note = Description of Artificial Sequence: Synthetic polynucleotide
  source 1..138: mol_type = other RNA
gttggtgactgccacgcccaagttttagagctagaaatagcaagttaaaataaggctagtccgttatcaacttgaaaaagtggcaccgagtcggtgcggccagcagtgaacaccccttgggcgtggcagtcttttttt

SEQ ID NO: 4978 - RNA, 138 nt, synthetic construct
  misc_feature 1..138: note = Description of Artificial Sequence: Synthetic polynucleotide
  source 1..138: mol_type = other RNA
ttggtgactgccacgcccaagttttagagctagaaatagcaagttaaaataaggctagtccgttatcaacttgaaaaagtggcaccgagtcggtgcgactgcggaggccagcagtgaacaccccttgggcgtggcagt

SEQ ID NO: 4979 - RNA, 138 nt, synthetic construct
  misc_feature 1..138: note = Description of Artificial Sequence: Synthetic polynucleotide
  source 1..138: mol_type = other RNA
ttggtgactgccacgcccaagttttagagctagaaatagcaagttaaaataaggctagtccgttatcaacttgaaaaagtggcaccgagtcggtgctgcggaggccagcagtgaacaccccttgggcgtggcagtcac

SEQ ID NO: 4980 - RNA, 138 nt, synthetic construct
  misc_feature 1..138: note = Description of Artificial Sequence: Synthetic polynucleotide
  source 1..138: mol_type = other RNA
ttggtgactgccacgcccaagttttagagctagaaatagcaagttaaaataaggctagtccgttatcaacttgaaaaagtggcaccgagtcggtgcggactgcggaggccagcagtgaacaccccttgggcgtggcag

SEQ ID NO: 4981 - RNA, 138 nt, synthetic construct
  misc_feature 1..138: note = Description of Artificial Sequence: Synthetic polynucleotide
  source 1..138: mol_type = other RNA
gttggtgactgccacgcccaagttttagagctagaaatagcaagttaaaataaggctagtccgttatcaacttgaaaaagtggcaccgagtcggtgcggaggccagcagtgaacaccccttgggcgtggcattttttt

SEQ ID NO: 4982 - RNA, 138 nt, synthetic construct
  misc_feature 1..138: note = Description of Artificial Sequence: Synthetic polynucleotide
  source 1..138: mol_type = other RNA
gttggtgactgccacgcccaagttttagagctagaaatagcaagttaaaataaggctagtccgttatcaacttgaaaaagtggcaccgagtcggtgcgccagcagtgaacaccccttgggcgtggcagtcactttttt

SEQ ID NO: 4983 - RNA, 138 nt, synthetic construct
  misc_feature 1..138: note = Description of Artificial Sequence: Synthetic polynucleotide
  source 1..138: mol_type = other RNA
ttggtgactgccacgcccaagttttagagctagaaatagcaagttaaaataaggctagtccgttatcaacttgaaaaagtggcaccgagtcggtgcgccagcagtgaacatcccttgggcgtggcagtcaccaatttt

SEQ ID NO: 4984 - RNA, 138 nt, synthetic construct
  misc_feature 1..138: note = Description of Artificial Sequence: Synthetic polynucleotide
  source 1..138: mol_type = other RNA
gttggtgactgccacgcccaagttttagagctagaaatagcaagttaaaataaggctagtccgttatcaacttgaaaaagtggcaccgagtcggtgcgaggccagcagtgaacaccccttgggcgtggcagttttttt

SEQ ID NO: 4985 - RNA, 139 nt, synthetic construct
  misc_feature 1..139: note = Description of Artificial Sequence: Synthetic polynucleotide
  source 1..139: mol_type = other RNA
ttggtgactgccacgcccaagttttagagctagaaatagcaagttaaaataaggctagtccgttatcaacttgaaaaagtggcaccgagtcggtgcggggactgcggaggccagcagtgaacaccccttgggcgtggca

SEQ ID NO: 4986 - RNA, 139 nt, synthetic construct
  misc_feature 1..139: note = Description of Artificial Sequence: Synthetic polynucleotide
  source 1..139: mol_type = other RNA
ttggtgactgccacgcccaagttttagagctagaaatagcaagttaaaataaggctagtccgttatcaacttgaaaaagtggcaccgagtcggtgctggggactgcggaggccagcagtgaacaccccttgggcgtggc

SEQ ID NO: 4987 - RNA, 139 nt, synthetic construct
  misc_feature 1..139: note = Description of Artificial Sequence: Synthetic polynucleotide
  source 1..139: mol_type = other RNA
ttggtgactgccacgcccaagttttagagctagaaatagcaagttaaaataaggctagtccgttatcaacttgaaaaagtggcaccgagtcggtgcggactgcggaggccagcagtgaacaccccttgggcgtggcagt

SEQ ID NO: 4988 - RNA, 139 nt, synthetic construct
  misc_feature 1..139: note = Description of Artificial Sequence: Synthetic polynucleotide
  source 1..139: mol_type = other RNA
gttggtgactgccacgcccaagttttagagctagaaatagcaagttaaaataaggctagtccgttatcaacttgaaaaagtggcaccgagtcggtgctgcggaggccagcagtgaacaccccttgggcgtggttttttt

SEQ ID NO: 4989 - RNA, 139 nt, synthetic construct
  misc_feature 1..139: note = Description of Artificial Sequence: Synthetic polynucleotide
  source 1..139: mol_type = other RNA
gttggtgactgccacgcccaagttttagagctagaaatagcaagttaaaataaggctagtccgttatcaacttgaaaaagtggcaccgagtcggtgcgcggaggccagcagtgaacaccccttgggcgtggcttttttt

SEQ ID NO: 4990 - RNA, 139 nt, synthetic construct
  misc_feature 1..139: note = Description of Artificial Sequence: Synthetic polynucleotide
  source 1..139: mol_type = other RNA
ttggtgactgccacgcccaagttttagagctagaaatagcaagttaaaataaggctagtccgttatcaacttgaaaaagtggcaccgagtcggtgcgggactgcggaggccagcagtgaacaccccttgggcgtggcag

SEQ ID NO: 4991 - RNA, 139 nt, synthetic construct
  misc_feature 1..139: note = Description of Artificial Sequence: Synthetic polynucleotide
  source 1..139: mol_type = other RNA
gttggtgactgccacgcccaagttttagagctagaaatagcaagttaaaataaggctagtccgttatcaacttgaaaaagtggcaccgagtcggtgcggccagcagtgaacaccccttgggcgtggcagtcattttttt

SEQ ID NO: 4992 - RNA, 139 nt, synthetic construct
  misc_feature 1..139: note = Description of Artificial Sequence: Synthetic polynucleotide
  source 1..139: mol_type = other RNA
gttggtgactgccacgcccaagttttagagctagaaatagcaagttaaaataaggctagtccgttatcaacttgaaaaagtggcaccgagtcggtgcaggccagcagtgaacaccccttgggcgtggcagtcttttttt

SEQ ID NO: 4993 - RNA, 139 nt, synthetic construct
  misc_feature 1..139: note = Description of Artificial Sequence: Synthetic polynucleotide
  source 1..139: mol_type = other RNA
ttggtgactgccacgcccaagttttagagctagaaatagcaagttaaaataaggctagtccgttatcaacttgaaaaagtggcaccgagtcggtgcactgcggaggccagcagtgaacaccccttgggcgtggcagtca

SEQ ID NO: 4994 - RNA, 139 nt, synthetic construct
  misc_feature 1..139: note = Description of Artificial Sequence: Synthetic polynucleotide
  source 1..139: mol_type = other RNA
gttggtgactgccacgcccaagttttagagctagaaatagcaagttaaaataaggctagtccgttatcaacttgaaaaagtggcaccgagtcggtgcgaggccagcagtgaacaccccttgggcgtggcagtttttttt

SEQ ID NO: 4995 - RNA, 139 nt, synthetic construct
  misc_feature 1..139: note = Description of Artificial Sequence: Synthetic polynucleotide
  source 1..139: mol_type = other RNA
ttggtgactgccacgcccaagttttagagctagaaatagcaagttaaaataaggctagtccgttatcaacttgaaaaagtggcaccgagtcggtgcgtggggactgcggaggccagcagtgaacaccccttgggcgtgg

SEQ ID NO: 4996 - RNA, 139 nt, synthetic construct
  misc_feature 1..139: note = Description of Artificial Sequence: Synthetic polynucleotide
  source 1..139: mol_type = other RNA
gttggtgactgccacgcccaagttttagagctagaaatagcaagttaaaataaggctagtccgttatcaacttgaaaaagtggcaccgagtcggtgcgccagcagtgaacaccccttgggcgtggcagtcacttttttt

SEQ ID NO: 4997 - RNA, 139 nt, synthetic construct
  misc_feature 1..139: note = Description of Artificial Sequence: Synthetic polynucleotide
  source 1..139: mol_type = other RNA
gttggtgactgccacgcccaagttttagagctagaaatagcaagttaaaataaggctagtccgttatcaacttgaaaaagtggcaccgagtcggtgcggaggccagcagtgaacaccccttgggcgtggcagttttttt

SEQ ID NO: 4998 - RNA, 139 nt, synthetic construct
  misc_feature 1..139: note = Description of Artificial Sequence: Synthetic polynucleotide
  source 1..139: mol_type = other RNA
ttggtgactgccacgcccaagttttagagctagaaatagcaagttaaaataaggctagtccgttatcaacttgaaaaagtggcaccgagtcggtgcgactgcggaggccagcagtgaacaccccttgggcgtggcagtc

SEQ ID NO: 4999 - RNA, 140 nt, synthetic construct
  misc_feature 1..140: note = Description of Artificial Sequence: Synthetic polynucleotide
  source 1..140: mol_type = other RNA
gttggtgactgccacgcccaagttttagagctagaaatagcaagttaaaataaggctagtccgttatcaacttgaaaaagtggcaccgagtcggtgcggccagcagtgaacaccccttgggcgtggcagtcacttttttt

SEQ ID NO: 5000 - RNA, 140 nt, synthetic construct
  misc_feature 1..140: note = Description of Artificial Sequence: Synthetic polynucleotide
  source 1..140: mol_type = other RNA
ttggtgactgccacgcccaagttttagagctagaaatagcaagttaaaataaggctagtccgttatcaacttgaaaaagtggcaccgagtcggtgctggggactgcggaggccagcagtgaacaccccttgggcgtggca

SEQ ID NO: 5001 - RNA, 140 nt, synthetic construct
  misc_feature 1..140: note = Description of Artificial Sequence: Synthetic polynucleotide
  source 1..140: mol_type = other RNA
ttggtgactgccacgcccaagttttagagctagaaatagcaagttaaaataaggctagtccgttatcaacttgaaaaagtggcaccgagtcggtgcgggactgcggaggccagcagtgaacaccccttgggcgtggcagt

SEQ ID NO: 5002 - RNA, 140 nt, synthetic construct
  misc_feature 1..140: note = Description of Artificial Sequence: Synthetic polynucleotide
  source 1..140: mol_type = other RNA
ttggtgactgccacgcccaagttttagagctagaaatagcaagttaaaataaggctagtccgttatcaacttgaaaaagtggcaccgagtcggtgcggtggggactgcggaggccagcagtgaacaccccttgggcgtgg

SEQ ID NO: 5003 - RNA, 140 nt, synthetic construct
  misc_feature 1..140: note = Description of Artificial Sequence: Synthetic polynucleotide
  source 1..140: mol_type = other RNA
ttggtgactgccacgcccaagttttagagctagaaatagcaagttaaaataaggctagtccgttatcaacttgaaaaagtggcaccgagtcggtgcggggactgcggaggccagcagtgaacaccccttgggcgtggcag

SEQ ID NO: 5004 - RNA, 140 nt, synthetic construct
  misc_feature 1..140: note = Description of Artificial Sequence: Synthetic polynucleotide
  source 1..140: mol_type = other RNA
ttggtgactgccacgcccaagttttagagctagaaatagcaagttaaaataaggctagtccgttatcaacttgaaaaagtggcaccgagtcggtgcggactgcggaggccagcagtgaacaccccttgggcgtggcagtc

SEQ ID NO: 5005 - RNA, 140 nt, synthetic construct
  misc_feature 1..140: note = Description of Artificial Sequence: Synthetic polynucleotide
  source 1..140: mol_type = other RNA
ttggtgactgccacgcccaagttttagagctagaaatagcaagttaaaataaggctagtccgttatcaacttgaaaaagtggcaccgagtcggtgcgtggggactgcggaggccagcagtgaacaccccttgggcgtggc

SEQ ID NO: 5006 - RNA, 140 nt, synthetic construct
  misc_feature 1..140: note = Description of Artificial Sequence: Synthetic polynucleotide
  source 1..140: mol_type = other RNA
gttggtgactgccacgcccaagttttagagctagaaatagcaagttaaaataaggctagtccgttatcaacttgaaaaagtggcaccgagtcggtgcgcggaggccagcagtgaacaccccttgggcgtggcattttttt

SEQ ID NO: 5007 - RNA, 140 nt, synthetic construct
  misc_feature 1..140: note = Description of Artificial Sequence: Synthetic polynucleotide
  source 1..140: mol_type = other RNA
gttggtgactgccacgcccaagttttagagctagaaatagcaagttaaaataaggctagtccgttatcaacttgaaaaagtggcaccgagtcggtgcgaggccagcagtgaacaccccttgggcgtggcagtcttttttt

SEQ ID NO: 5008 - RNA, 140 nt, synthetic construct
  misc_feature 1..140: note = Description of Artificial Sequence: Synthetic polynucleotide
  source 1..140: mol_type = other RNA
gttggtgactgccacgcccaagttttagagctagaaatagcaagttaaaataaggctagtccgttatcaacttgaaaaagtggcaccgagtcggtgcaggccagcagtgaacaccccttgggcgtggcagtcattttttt

SEQ ID NO: 5009 - RNA, 140 nt, synthetic construct
  misc_feature 1..140: note = Description of Artificial Sequence: Synthetic polynucleotide
  source 1..140: mol_type = other RNA
gttggtgactgccacgcccaagttttagagctagaaatagcaagttaaaataaggctagtccgttatcaacttgaaaaagtggcaccgagtcggtgcgccagcagtgaacaccccttgggcgtggcagtcaccatttttt

SEQ ID NO: 5010 - RNA, 140 nt, synthetic construct
  misc_feature 1..140: note = Description of Artificial Sequence: Synthetic polynucleotide
  source 1..140: mol_type = other RNA
ttggtgactgccacgcccaagttttagagctagaaatagcaagttaaaataaggctagtccgttatcaacttgaaaaagtggcaccgagtcggtgcgactgcggaggccagcagtgaacaccccttgggcgtggcagtca

SEQ ID NO: 5011 - RNA, 140 nt, synthetic construct
  misc_feature 1..140: note = Description of Artificial Sequence: Synthetic polynucleotide
  source 1..140: mol_type = other RNA
ttggtgactgccacgcccaagttttagagctagaaatagcaagttaaaataaggctagtccgttatcaacttgaaaaagtggcaccgagtcggtgcactgcggaggccagcagtgaacaccccttgggcgtggcagtcac

SEQ ID NO: 5012 - RNA, 140 nt, synthetic construct
  misc_feature 1..140: note = Description of Artificial Sequence: Synthetic polynucleotide
  source 1..140: mol_type = other RNA
gttggtgactgccacgcccaagttttagagctagaaatagcaagttaaaataaggctagtccgttatcaacttgaaaaagtggcaccgagtcggtgctgcggaggccagcagtgaacaccccttgggcgtggcttttttt

SEQ ID NO: 5013 - RNA, 140 nt, synthetic construct
  misc_feature 1..140: note = Description of Artificial Sequence: Synthetic polynucleotide
  source 1..140: mol_type = other RNA
gttggtgactgccacgcccaagttttagagctagaaatagcaagttaaaataaggctagtccgttatcaacttgaaaaagtggcaccgagtcggtgcggaggccagcagtgaacaccccttgggcgtggcagtttttttt

SEQ ID NO: 5014 - RNA, 141 nt, synthetic construct
  misc_feature 1..141: note = Description of Artificial Sequence: Synthetic polynucleotide
  source 1..141: mol_type = other RNA
gttggtgactgccacgcccaagttttagagctagaaatagcaagttaaaataaggctagtccgttatcaacttgaaaaagtggcaccgagtcggtgcgcggaggccagcagtgaacaccccttgggcgtggcagttttttt

SEQ ID NO: 5015 - RNA, 141 nt, synthetic construct
  misc_feature 1..141: note = Description of Artificial Sequence: Synthetic polynucleotide
  source 1..141: mol_type = other RNA
gttggtgactgccacgcccaagttttagagctagaaatagcaagttaaaataaggctagtccgttatcaacttgaaaaagtggcaccgagtcggtgcactgcggaggccagcagtgaacaccccttgggcgtggttttttt

SEQ ID NO: 5016 - RNA, 141 nt, synthetic construct
  misc_feature 1..141: note = Description of Artificial Sequence: Synthetic polynucleotide
  source 1..141: mol_type = other RNA
gttggtgactgccacgcccaagttttagagctagaaatagcaagttaaaataaggctagtccgttatcaacttgaaaaagtggcaccgagtcggtgcaggccagcagtgaacaccccttgggcgtggcagtcacttttttt

SEQ ID NO: 5017 - RNA, 141 nt, synthetic construct
  misc_feature 1..141: note = Description of Artificial Sequence: Synthetic polynucleotide
  source 1..141: mol_type = other RNA
gttggtgactgccacgcccaagttttagagctagaaatagcaagttaaaataaggctagtccgttatcaacttgaaaaagtggcaccgagtcggtgctgcggaggccagcagtgaacaccccttgggcgtggcattttttt

SEQ ID NO: 5018 - RNA, 141 nt, synthetic construct
  misc_feature 1..141: note = Description of Artificial Sequence: Synthetic polynucleotide
  source 1..141: mol_type = other RNA
ttggtgactgccacgcccaagttttagagctagaaatagcaagttaaaataaggctagtccgttatcaacttgaaaaagtggcaccgagtcggtgcggggactgcggaggccagcagtgaacaccccttgggcgtggcagt

SEQ ID NO: 5019 - RNA, 141 nt, synthetic construct
  misc_feature 1..141: note = Description of Artificial Sequence: Synthetic polynucleotide
  source 1..141: mol_type = other RNA
ttggtgactgccacgcccaagttttagagctagaaatagcaagttaaaataaggctagtccgttatcaacttgaaaaagtggcaccgagtcggtgcgtggggactgcggaggccagcagtgaacaccccttgggcgtggca

SEQ ID NO: 5020 - RNA, 141 nt, synthetic construct
  misc_feature 1..141: note = Description of Artificial Sequence: Synthetic polynucleotide
  source 1..141: mol_type = other RNA
ttggtgactgccacgcccaagttttagagctagaaatagcaagttaaaataaggctagtccgttatcaacttgaaaaagtggcaccgagtcggtgcgactgcggaggccagcagtgaacaccccttgggcgtggcagtcac

SEQ ID NO: 5021 - RNA, 141 nt, synthetic construct
  misc_feature 1..141: note = Description of Artificial Sequence: Synthetic polynucleotide
  source 1..141: mol_type = other RNA
ttggtgactgccacgcccaagttttagagctagaaatagcaagttaaaataaggctagtccgttatcaacttgaaaaagtggcaccgagtcggtgcggtggggactgcggaggccagcagtgaacaccccttgggcgtggc

SEQ ID NO: 5022 - RNA, 141 nt, synthetic construct
  misc_feature 1..141: note = Description of Artificial Sequence: Synthetic polynucleotide
  source 1..141: mol_type = other RNA
ttggtgactgccacgcccaagttttagagctagaaatagcaagttaaaataaggctagtccgttatcaacttgaaaaagtggcaccgagtcggtgctggggactgcggaggccagcagtgaacaccccttgggcgtggcag

SEQ ID NO: 5023 - RNA, 141 nt, synthetic construct
  misc_feature 1..141: note = Description of Artificial Sequence: Synthetic polynucleotide
  source 1..141: mol_type = other RNA
ttggtgactgccacgcccaagttttagagctagaaatagcaagttaaaataaggctagtccgttatcaacttgaaaaagtggcaccgagtcggtgcggactgcggaggccagcagtgaacaccccttgggcgtggcagtca

SEQ ID NO: 5024 - RNA, 141 nt, synthetic construct
  misc_feature 1..141: note = Description of Artificial Sequence: Synthetic polynucleotide
  source 1..141: mol_type = other RNA
ttggtgactgccacgcccaagttttagagctagaaatagcaagttaaaataaggctagtccgttatcaacttgaaaaagtggcaccgagtcggtgctggtggggactgcggaggccagcagtgaacaccccttgggcgtgg

SEQ ID NO: 5025 - RNA, 141 nt, synthetic construct
  misc_feature 1..141: note = Description of Artificial Sequence: Synthetic polynucleotide
  source 1..141: mol_type = other RNA
gttggtgactgccacgcccaagttttagagctagaaatagcaagttaaaataaggctagtccgttatcaacttgaaaaagtggcaccgagtcggtgcgaggccagcagtgaacaccccttgggcgtggcagtcattttttt

SEQ ID NO: 5026 - RNA, 141 nt, synthetic construct
  misc_feature 1..141: note = Description of Artificial Sequence: Synthetic polynucleotide
  source 1..141: mol_type = other RNA
ttggtgactgccacgcccaagttttagagctagaaatagcaagttaaaataaggctagtccgttatcaacttgaaaaagtggcaccgagtcggtgcgggactgcggaggccagcagtgaacaccccttgggcgtggcagtc

SEQ ID NO: 5027 - RNA, 141 nt, synthetic construct
  misc_feature 1..141: note = Description of Artificial Sequence: Synthetic polynucleotide
  source 1..141: mol_type = other RNA
gttggtgactgccacgcccaagttttagagctagaaatagcaagttaaaataaggctagtccgttatcaacttgaaaaagtggcaccgagtcggtgcggaggccagcagtgaacaccccttgggcgtggcagtcttttttt

SEQ ID NO: 5028 - RNA, 142 nt, synthetic construct
  misc_feature 1..142: note = Description of Artificial Sequence: Synthetic polynucleotide
  source 1..142: mol_type = other RNA
gttggtgactgccacgcccaagttttagagctagaaatagcaagttaaaataaggctagtccgttatcaacttgaaaaagtggcaccgagtcggtgcgcggaggccagcagtgaacaccccttgggcgtggcagtttttttt

SEQ ID NO: 5029 - RNA, 142 nt, synthetic construct
  misc_feature 1..142: note = Description of Artificial Sequence: Synthetic polynucleotide
  source 1..142: mol_type = other RNA
ttggtgactgccacgcccaagttttagagctagaaatagcaagttaaaataaggctagtccgttatcaacttgaaaaagtggcaccgagtcggtgcggactgcggaggccagcagtgaacaccccttgggcgtggcagtcac

SEQ ID NO: 5030 - RNA, 142 nt, synthetic construct
  misc_feature 1..142: note = Description of Artificial Sequence: Synthetic polynucleotide
  source 1..142: mol_type = other RNA
ttggtgactgccacgcccaagttttagagctagaaatagcaagttaaaataaggctagtccgttatcaacttgaaaaagtggcaccgagtcggtgcggtggggactgcggaggccagcagtgaacaccccttgggcgtggca

SEQ ID NO: 5031 - RNA, 142 nt, synthetic construct
  misc_feature 1..142: note = Description of Artificial Sequence: Synthetic polynucleotide
  source 1..142: mol_type = other RNA
gttggtgactgccacgcccaagttttagagctagaaatagcaagttaaaataaggctagtccgttatcaacttgaaaaagtggcaccgagtcggtgcactgcggaggccagcagtgaacaccccttgggcgtggcttttttt

SEQ ID NO: 5032 - RNA, 142 nt, synthetic construct
  misc_feature 1..142: note = Description of Artificial Sequence: Synthetic polynucleotide
  source 1..142: mol_type = other RNA
gttggtgactgccacgcccaagttttagagctagaaatagcaagttaaaataaggctagtccgttatcaacttgaaaaagtggcaccgagtcggtgcgaggccagcagtgaacaccccttgggcgtggcagtcacttttttt

SEQ ID NO: 5033 - RNA, 142 nt, synthetic construct
  misc_feature 1..142: note = Description of Artificial Sequence: Synthetic polynucleotide
  source 1..142: mol_type = other RNA
ttggtgactgccacgcccaagttttagagctagaaatagcaagttaaaataaggctagtccgttatcaacttgaaaaagtggcaccgagtcggtgctggtggggactgcggaggccagcagtgaacaccccttgggcgtggc

SEQ ID NO: 5034 - RNA, 142 nt, synthetic construct
  misc_feature 1..142: note = Description of Artificial Sequence: Synthetic polynucleotide
  source 1..142: mol_type = other RNA
ttggtgactgccacgcccaagttttagagctagaaatagcaagttaaaataaggctagtccgttatcaacttgaaaaagtggcaccgagtcggtgctggggactgcggaggccagcagtgaacaccccttgggcgtggcagt

SEQ ID NO: 5035 - RNA, 142 nt, synthetic construct
  misc_feature 1..142: note = Description of Artificial Sequence: Synthetic polynucleotide
  source 1..142: mol_type = other RNA
ttggtgactgccacgcccaagttttagagctagaaatagcaagttaaaataaggctagtccgttatcaacttgaaaaagtggcaccgagtcggtgcgtggggactgcggaggccagcagtgaacaccccttgggcgtggcag

SEQ ID NO: 5036 - RNA, 142 nt, synthetic construct
  misc_feature 1..142: note = Description of Artificial Sequence: Synthetic polynucleotide
  source 1..142: mol_type = other RNA
ttggtgactgccacgcccaagttttagagctagaaatagcaagttaaaataaggctagtccgttatcaacttgaaaaagtggcaccgagtcggtgcgggactgcggaggccagcagtgaacaccccttgggcgtggcagtca

SEQ ID NO: 5037 - RNA, 142 nt, synthetic construct
  misc_feature 1..142: note = Description of Artificial Sequence: Synthetic polynucleotide
  source 1..142: mol_type = other RNA
ttggtgactgccacgcccaagttttagagctagaaatagcaagttaaaataaggctagtccgttatcaacttgaaaaagtggcaccgagtcggtgcgtggtggggactgcggaggccagcagtgaacaccccttgggcgtgg

SEQ ID NO: 5038 - RNA, 142 nt, synthetic construct
  misc_feature 1..142: note = Description of Artificial Sequence: Synthetic polynucleotide
  source 1..142: mol_type = other RNA
gttggtgactgccacgcccaagttttagagctagaaatagcaagttaaaataaggctagtccgttatcaacttgaaaaagtggcaccgagtcggtgcgactgcggaggccagcagtgaacaccccttgggcgtggttttttt

SEQ ID NO: 5039 - RNA, 142 nt, synthetic construct
  misc_feature 1..142: note = Description of Artificial Sequence: Synthetic polynucleotide
  source 1..142: mol_type = other RNA
ttggtgactgccacgcccaagttttagagctagaaatagcaagttaaaataaggctagtccgttatcaacttgaaaaagtggcaccgagtcggtgcggggactgcggaggccagcagtgaacaccccttgggcgtggcagtc

SEQ ID NO: 5040 - RNA, 142 nt, synthetic construct
  misc_feature 1..142: note = Description of Artificial Sequence: Synthetic polynucleotide
  source 1..142: mol_type = other RNA
gttggtgactgccacgcccaagttttagagctagaaatagcaagttaaaataaggctagtccgttatcaacttgaaaaagtggcaccgagtcggtgctgcggaggccagcagtgaacaccccttgggcgtggcagttttttt

SEQ ID NO: 5041 - RNA, 142 nt, synthetic construct
  misc_feature 1..142: note = Description of Artificial Sequence: Synthetic polynucleotide
  source 1..142: mol_type = other RNA
gttggtgactgccacgcccaagttttagagctagaaatagcaagttaaaataaggctagtccgttatcaacttgaaaaagtggcaccgagtcggtgcggaggccagcagtgaacaccccttgggcgtggcagtcattttttt

SEQ ID NO: 5042 - RNA, 143 nt, synthetic construct
  misc_feature 1..143: note = Description of Artificial Sequence: Synthetic polynucleotide
  source 1..143: mol_type = other RNA
ttggtgactgccacgcccaagttttagagctagaaatagcaagttaaaataaggctagtccgttatcaacttgaaaaagtggcaccgagtcggtgctggtggggactgcggaggccagcagtgaacaccccttgggcgtggca

SEQ ID NO: 5043 - RNA, 143 nt, synthetic construct
  misc_feature 1..143: note = Description of Artificial Sequence: Synthetic polynucleotide
  source 1..143: mol_type = other RNA
ttggtgactgccacgcccaagttttagagctagaaatagcaagttaaaataaggctagtccgttatcaacttgaaaaagtggcaccgagtcggtgcgtggtggggactgcggaggccagcagtgaacaccccttgggcgtggc

SEQ ID NO: 5044 - RNA, 143 nt, synthetic construct
  misc_feature 1..143: note = Description of Artificial Sequence: Synthetic polynucleotide
  source 1..143: mol_type = other RNA
ttggtgactgccacgcccaagttttagagctagaaatagcaagttaaaataaggctagtccgttatcaacttgaaaaagtggcaccgagtcggtgcggtggggactgcggaggccagcagtgaacaccccttgggcgtggcag

SEQ ID NO: 5045 - RNA, 143 nt, synthetic construct
  misc_feature 1..143: note = Description of Artificial Sequence: Synthetic polynucleotide
  source 1..143: mol_type = other RNA
ttggtgactgccacgcccaagttttagagctagaaatagcaagttaaaataaggctagtccgttatcaacttgaaaaagtggcaccgagtcggtgcgggactgcggaggccagcagtgaacaccccttgggcgtggcagtcac

SEQ ID NO: 5046 - RNA, 143 nt, synthetic construct
  misc_feature 1..143: note = Description of Artificial Sequence: Synthetic polynucleotide
  source 1..143: mol_type = other RNA
ttggtgactgccacgcccaagttttagagctagaaatagcaagttaaaataaggctagtccgttatcaacttgaaaaagtggcaccgagtcggtgcgtggggactgcggaggccagcagtgaacaccccttgggcgtggcagt

SEQ ID NO: 5047 - RNA, 143 nt, synthetic construct
  misc_feature 1..143: note = Description of Artificial Sequence: Synthetic polynucleotide
  source 1..143: mol_type = other RNA
ttggtgactgccacgcccaagttttagagctagaaatagcaagttaaaataaggctagtccgttatcaacttgaaaaagtggcaccgagtcggtgcggggactgcggaggccagcagtgaacaccccttgggcgtggcagtca

SEQ ID NO: 5048 - RNA, 143 nt, synthetic construct
  misc_feature 1..143: note = Description of Artificial Sequence: Synthetic polynucleotide
  source 1..143: mol_type = other RNA
gttggtgactgccacgcccaagttttagagctagaaatagcaagttaaaataaggctagtccgttatcaacttgaaaaagtggcaccgagtcggtgctgcggaggccagcagtgaacaccccttgggcgtggcagtttttttt

SEQ ID NO: 5049 - RNA, 143 nt, synthetic construct
  misc_feature 1..143: note = Description of Artificial Sequence: Synthetic polynucleotide
  source 1..143: mol_type = other RNA
gttggtgactgccacgcccaagttttagagctagaaatagcaagttaaaataaggctagtccgttatcaacttgaaaaagtggcaccgagtcggtgcggactgcggaggccagcagtgaacaccccttgggcgtggttttttt

SEQ ID NO: 5050 - RNA, 143 nt, synthetic construct
  misc_feature 1..143: note = Description of Artificial Sequence: Synthetic polynucleotide
  source 1..143: mol_type = other RNA
gttggtgactgccacgcccaagttttagagctagaaatagcaagttaaaataaggctagtccgttatcaacttgaaaaagtggcaccgagtcggtgcgactgcggaggccagcagtgaacaccccttgggcgtggcttttttt

SEQ ID NO: 5051 - RNA, 143 nt, synthetic construct
  misc_feature 1..143: note = Description of Artificial Sequence: Synthetic polynucleotide
  source 1..143: mol_type = other RNA
gttggtgactgccacgcccaagttttagagctagaaatagcaagttaaaataaggctagtccgttatcaacttgaaaaagtggcaccgagtcggtgcggaggccagcagtgaacaccccttgggcgtggcagtcacttttttt

SEQ ID NO: 5052 - RNA, 143 nt, synthetic construct
  misc_feature 1..143: note = Description of Artificial Sequence: Synthetic polynucleotide
  source 1..143: mol_type = other RNA
gttggtgactgccacgcccaagttttagagctagaaatagcaagttaaaataaggctagtccgttatcaacttgaaaaagtggcaccgagtcggtgcgcggaggccagcagtgaacaccccttgggcgtggcagtcttttttt

SEQ ID NO: 5053 - RNA, 143 nt, synthetic construct
  misc_feature 1..143: note = Description of Artificial Sequence: Synthetic polynucleotide
  source 1..143: mol_type = other RNA
ttggtgactgccacgcccaagttttagagctagaaatagcaagttaaaataaggctagtccgttatcaacttgaaaaagtggcaccgagtcggtgctggggactgcggaggccagcagtgaacaccccttgggcgtggcagtc

SEQ ID NO: 5054 - RNA, 143 nt, synthetic construct
  misc_feature 1..143: note = Description of Artificial Sequence: Synthetic polynucleotide
  source 1..143: mol_type = other RNA
ttggtgactgccacgcccaagttttagagctagaaatagcaagttaaaataaggctagtccgttatcaacttgaaaaagtggcaccgagtcggtgctgtggtggggactgcggaggccagcagtgaacaccccttgggcgtgg

SEQ ID NO: 5055 - RNA, 143 nt, synthetic construct
  misc_feature 1..143: note = Description of Artificial Sequence: Synthetic polynucleotide
  source 1..143: mol_type = other RNA
gttggtgactgccacgcccaagttttagagctagaaatagcaagttaaaataaggctagtccgttatcaacttgaaaaagtggcaccgagtcggtgcactgcggaggccagcagtgaacaccccttgggcgtggcattttttt

SEQ ID NO: 5056 - RNA, 144 nt, synthetic construct
  misc_feature 1..144: note = Description of Artificial Sequence: Synthetic polynucleotide
  source 1..144: mol_type = other RNA
ttggtgactgccacgcccaagttttagagctagaaatagcaagttaaaataaggctagtccgttatcaacttgaaaaagtggcaccgagtcggtgctggtggggactgcggaggccagcagtgaacaccccttgggcgtggcag

SEQ ID NO: 5057 - RNA, 144 nt, synthetic construct
  misc_feature 1..144: note = Description of Artificial Sequence: Synthetic polynucleotide
  source 1..144: mol_type = other RNA
ttggtgactgccacgcccaagttttagagctagaaatagcaagttaaaataaggctagtccgttatcaacttgaaaaagtggcaccgagtcggtgcggggactgcggaggccagcagtgaacaccccttgggcgtggcagtcac

SEQ ID NO: 5058 - RNA, 144 nt, synthetic construct
  misc_feature 1..144: note = Description of Artificial Sequence: Synthetic polynucleotide
  source 1..144: mol_type = other RNA
ttggtgactgccacgcccaagttttagagctagaaatagcaagttaaaataaggctagtccgttatcaacttgaaaaagtggcaccgagtcggtgctgtggtggggactgcggaggccagcagtgaacaccccttgggcgtggc

SEQ ID NO: 5059 - RNA, 144 nt, synthetic construct
  misc_feature 1..144: note = Description of Artificial Sequence: Synthetic polynucleotide
  source 1..144: mol_type = other RNA
gttggtgactgccacgcccaagttttagagctagaaatagcaagttaaaataaggctagtccgttatcaacttgaaaaagtggcaccgagtcggtgcggactgcggaggccagcagtgaacaccccttgggcgtggcttttttt

SEQ ID NO: 5060 - RNA, 144 nt, synthetic construct
  misc_feature 1..144: note = Description of Artificial Sequence: Synthetic polynucleotide
  source 1..144: mol_type = other RNA
ttggtgactgccacgcccaagttttagagctagaaatagcaagttaaaataaggctagtccgttatcaacttgaaaaagtggcaccgagtcggtgcggtggggactgcggaggccagcagtgaacaccccttgggcgtggcagt

SEQ ID NO: 5061 - RNA, 144 nt, synthetic construct
  misc_feature 1..144: note = Description of Artificial Sequence: Synthetic polynucleotide
  source 1..144: mol_type = other RNA
gttggtgactgccacgcccaagttttagagctagaaatagcaagttaaaataaggctagtccgttatcaacttgaaaaagtggcaccgagtcggtgcgggactgcggaggccagcagtgaacaccccttgggcgtggttttttt

SEQ ID NO: 5062 - RNA, 144 nt, synthetic construct
  misc_feature 1..144: note = Description of Artificial Sequence: Synthetic polynucleotide
  source 1..144: mol_type = other RNA
ttggtgactgccacgcccaagttttagagctagaaatagcaagttaaaataaggctagtccgttatcaacttgaaaaagtggcaccgagtcggtgcgtggtggggactgcggaggccagcagtgaacaccccttgggcgtggca

SEQ ID NO: 5063 - RNA, 144 nt, synthetic construct
  misc_feature 1..144: note = Description of Artificial Sequence: Synthetic polynucleotide
  source 1..144: mol_type = other RNA
ttggtgactgccacgcccaagttttagagctagaaatagcaagttaaaataaggctagtccgttatcaacttgaaaaagtggcaccgagtcggtgcgtggggactgcggaggccagcagtgaacaccccttgggcgtggcagtc

SEQ ID NO: 5064 - RNA, 144 nt, synthetic construct
  misc_feature 1..144: note = Description of Artificial Sequence: Synthetic polynucleotide
  source 1..144: mol_type = other RNA
gttggtgactgccacgcccaagttttagagctagaaatagcaagttaaaataaggctagtccgttatcaacttgaaaaagtggcaccgagtcggtgcactgcggaggccagcagtgaacaccccttgggcgtggcagttttttt

SEQ ID NO: 5065 - RNA, 144 nt, synthetic construct
  misc_feature 1..144: note = Description of Artificial Sequence: Synthetic polynucleotide
  source 1..144: mol_type = other RNA
gttggtgactgccacgcccaagttttagagctagaaatagcaagttaaaataaggctagtccgttatcaacttgaaaaagtggcaccgagtcggtgcgactgcggaggccagcagtgaacaccccttgggcgtggcattttttt

SEQ ID NO: 5066 - RNA, 144 nt, synthetic construct
  misc_feature 1..144: note = Description of Artificial Sequence: Synthetic polynucleotide
  source 1..144: mol_type = other RNA
ttggtgactgccacgcccaagttttagagctagaaatagcaagttaaaataaggctagtccgttatcaacttgaaaaagtggcaccgagtcggtgctggggactgcggaggccagcagtgaacaccccttgggcgtggcagtca

SEQ ID NO: 5067 - RNA, 144 nt, synthetic construct
  misc_feature 1..144: note = Description of Artificial Sequence: Synthetic polynucleotide
  source 1..144: mol_type = other RNA
gttggtgactgccacgcccaagttttagagctagaaatagcaagttaaaataaggctagtccgttatcaacttgaaaaagtggcaccgagtcggtgctgcggaggccagcagtgaacaccccttgggcgtggcagtcttttttt

SEQ ID NO: 5068 - RNA, 144 nt, synthetic construct
  misc_feature 1..144: note = Description of Artificial Sequence: Synthetic polynucleotide
  source 1..144: mol_type = other RNA
gttggtgactgccacgcccaagttttagagctagaaatagcaagttaaaataaggctagtccgttatcaacttgaaaaagtggcaccgagtcggtgcgcggaggccagcagtgaacaccccttgggcgtggcagtcattttttt

SEQ ID NO: 5069 - RNA, 145 nt, synthetic construct
  misc_feature 1..145: note = Description of Artificial Sequence: Synthetic polynucleotide
  source 1..145: mol_type = other RNA
gttggtgactgccacgcccaagttttagagctagaaatagcaagttaaaataaggctagtccgttatcaacttgaaaaagtggcaccgagtcggtgctgcggaggccagcagtgaacaccccttgggcgtggcagtcattttttt

SEQ ID NO: 5070 - RNA, 145 nt, synthetic construct
  misc_feature 1..145: note = Description of Artificial Sequence: Synthetic polynucleotide
  source 1..145: mol_type = other RNA
ttggtgactgccacgcccaagttttagagctagaaatagcaagttaaaataaggctagtccgttatcaacttgaaaaagtggcaccgagtcggtgcggtggggactgcggaggccagcagtgaacaccccttgggcgtggcagtc

SEQ ID NO: 5071 - RNA, 145 nt, synthetic construct
  misc_feature 1..145: note = Description of Artificial Sequence: Synthetic polynucleotide
  source 1..145: mol_type = other RNA
ttggtgactgccacgcccaagttttagagctagaaatagcaagttaaaataaggctagtccgttatcaacttgaaaaagtggcaccgagtcggtgcgtggggactgcggaggccagcagtgaacaccccttgggcgtggcagtca

SEQ ID NO: 5072 - RNA, 145 nt, synthetic construct
  misc_feature 1..145: note = Description of Artificial Sequence: Synthetic polynucleotide
  source 1..145: mol_type = other RNA
ttggtgactgccacgcccaagttttagagctagaaatagcaagttaaaataaggctagtccgttatcaacttgaaaaagtggcaccgagtcggtgctggtggggactgcggaggccagcagtgaacaccccttgggcgtggcagt

SEQ ID NO: 5073 - RNA, 145 nt, synthetic construct
  misc_feature 1..145: note = Description of Artificial Sequence: Synthetic polynucleotide
  source 1..145: mol_type = other RNA
ttggtgactgccacgcccaagttttagagctagaaatagcaagttaaaataaggctagtccgttatcaacttgaaaaagtggcaccgagtcggtgcgtggtggggactgcggaggccagcagtgaacaccccttgggcgtggcag

SEQ ID NO: 5074 - RNA, 145 nt, synthetic construct
  misc_feature 1..145: note = Description of Artificial Sequence: Synthetic polynucleotide
  source 1..145: mol_type = other RNA
gttggtgactgccacgcccaagttttagagctagaaatagcaagttaaaataaggctagtccgttatcaacttgaaaaagtggcaccgagtcggtgcggactgcggaggccagcagtgaacaccccttgggcgtggcattttttt

SEQ ID NO: 5075 - RNA, 145 nt, synthetic construct
  misc_feature 1..145: note = Description of Artificial Sequence: Synthetic polynucleotide
  source 1..145: mol_type = other RNA
gttggtgactgccacgcccaagttttagagctagaaatagcaagttaaaataaggctagtccgttatcaacttgaaaaagtggcaccgagtcggtgcgggactgcggaggccagcagtgaacaccccttgggcgtggcttttttt

SEQ ID NO: 5076 - RNA, 145 nt, synthetic construct
  misc_feature 1..145: note = Description of Artificial Sequence: Synthetic polynucleotide
  source 1..145: mol_type = other RNA
ttggtgactgccacgcccaagttttagagctagaaatagcaagttaaaataaggctagtccgttatcaacttgaaaaagtggcaccgagtcggtgctgtggtggggactgcggaggccagcagtgaacaccccttgggcgtggca

SEQ ID NO: 5077 - RNA, 145 nt, synthetic construct
  misc_feature 1..145: note = Description of Artificial Sequence: Synthetic polynucleotide
  source 1..145: mol_type = other RNA
ttggtgactgccacgcccaagttttagagctagaaatagcaagttaaaataaggctagtccgttatcaacttgaaaaagtggcaccgagtcggtgctggggactgcggaggccagcagtgaacaccccttgggcgtggcagtcac

SEQ ID NO: 5078 - RNA, 145 nt, synthetic construct
  misc_feature 1..145: note = Description of Artificial Sequence: Synthetic polynucleotide
  source 1..145: mol_type = other RNA
gttggtgactgccacgcccaagttttagagctagaaatagcaagttaaaataaggctagtccgttatcaacttgaaaaagtggcaccgagtcggtgcgactgcggaggccagcagtgaacaccccttgggcgtggcagttttttt

SEQ ID NO: 5079 - RNA, 145 nt, synthetic construct
  misc_feature 1..145: note = Description of Artificial Sequence: Synthetic polynucleotide
  source 1..145: mol_type = other RNA
gttggtgactgccacgcccaagttttagagctagaaatagcaagttaaaataaggctagtccgttatcaacttgaaaaagtggcaccgagtcggtgcgcggaggccagcagtgaacaccccttgggcgtggcagtcacttttttt

SEQ ID NO: 5080 - RNA, 145 nt, synthetic construct
  misc_feature 1..145: note = Description of Artificial Sequence: Synthetic polynucleotide
  source 1..145: mol_type = other RNA
gttggtgactgccacgcccaagttttagagctagaaatagcaagttaaaataaggctagtccgttatcaacttgaaaaagtggcaccgagtcggtgcggggactgcggaggccagcagtgaacaccccttgggcgtggttttttt

SEQ ID NO: 5081 - RNA, 145 nt, synthetic construct
  misc_feature 1..145: note = Description of Artificial Sequence: Synthetic polynucleotide
  source 1..145: mol_type = other RNA
gttggtgactgccacgcccaagttttagagctagaaatagcaagttaaaataaggctagtccgttatcaacttgaaaaagtggcaccgagtcggtgcactgcggaggccagcagtgaacaccccttgggcgtggcagtttttttt

SEQ ID NO: 5082 - RNA, 146 nt, synthetic construct
  misc_feature 1..146: note = Description of Artificial Sequence: Synthetic polynucleotide
  source 1..146: mol_type = other RNA
gttggtgactgccacgcccaagttttagagctagaaatagcaagttaaaataaggctagtccgttatcaacttgaaaaagtggcaccgagtcggtgcgggactgcggaggccagcagtgaacaccccttgggcgtggcattttttt

SEQ ID NO: 5083 - RNA, 146 nt, synthetic construct
  misc_feature 1..146: note = Description of Artificial Sequence: Synthetic polynucleotide
  source 1..146: mol_type = other RNA
gttggtgactgccacgcccaagttttagagctagaaatagcaagttaaaataaggctagtccgttatcaacttgaaaaagtggcaccgagtcggtgcactgcggaggccagcagtgaacaccccttgggcgtggcagtcttttttt

SEQ ID NO: 5084 - RNA, 146 nt, synthetic construct
  misc_feature 1..146: note = Description of Artificial Sequence: Synthetic polynucleotide
  source 1..146: mol_type = other RNA
ttggtgactgccacgcccaagttttagagctagaaatagcaagttaaaataaggctagtccgttatcaacttgaaaaagtggcaccgagtcggtgctggtggggactgcggaggccagcagtgaacaccccttgggcgtggcagtc

SEQ ID NO: 5085 - RNA, 146 nt, synthetic construct
  misc_feature 1..146: note = Description of Artificial Sequence: Synthetic polynucleotide
  source 1..146: mol_type = other RNA
gttggtgactgccacgcccaagttttagagctagaaatagcaagttaaaataaggctagtccgttatcaacttgaaaaagtggcaccgagtcggtgcggggactgcggaggccagcagtgaacaccccttgggcgtggcttttttt

SEQ ID NO: 5086 - RNA, 146 nt, synthetic construct
  misc_feature 1..146: note = Description of Artificial Sequence: Synthetic polynucleotide
  source 1..146: mol_type = other RNA
gttggtgactgccacgcccaagttttagagctagaaatagcaagttaaaataaggctagtccgttatcaacttgaaaaagtggcaccgagtcggtgctgcggaggccagcagtgaacaccccttgggcgtggcagtcacttttttt

SEQ ID NO: 5087 - RNA, 146 nt, synthetic construct
  misc_feature 1..146: note = Description of Artificial Sequence: Synthetic polynucleotide
  source 1..146: mol_type = other RNA
gttggtgactgccacgcccaagttttagagctagaaatagcaagttaaaataaggctagtccgttatcaacttgaaaaagtggcaccgagtcggtgcggactgcggaggccagcagtgaacaccccttgggcgtggcagttttttt

SEQ ID NO: 5088 - RNA, 146 nt, synthetic construct
  misc_feature 1..146: note = Description of Artificial Sequence: Synthetic polynucleotide
  source 1..146: mol_type = other RNA
ttggtgactgccacgcccaagttttagagctagaaatagcaagttaaaataaggctagtccgttatcaacttgaaaaagtggcaccgagtcggtgcgctgtggtggggactgcggaggccagcagtgaacaccccttgggcgtggc

SEQ ID NO: 5089 - RNA, 146 nt, synthetic construct
  misc_feature 1..146: note = Description of Artificial Sequence: Synthetic polynucleotide
  source 1..146: mol_type = other RNA
gttggtgactgccacgcccaagttttagagctagaaatagcaagttaaaataaggctagtccgttatcaacttgaaaaagtggcaccgagtcggtgctggggactgcggaggccagcagtgaacaccccttgggcgtggttttttt

SEQ ID NO: 5090 - RNA, 146 nt, synthetic construct
  misc_feature 1..146: note = Description of Artificial Sequence: Synthetic polynucleotide
  source 1..146: mol_type = other RNA
gttggtgactgccacgcccaagttttagagctagaaatagcaagttaaaataaggctagtccgttatcaacttgaaaaagtggcaccgagtcggtgcgactgcggaggccagcagtgaacaccccttgggcgtggcagtttttttt

SEQ ID NO: 5091 - RNA, 146 nt, synthetic construct
  misc_feature 1..146: note = Description of Artificial Sequence: Synthetic polynucleotide
  source 1..146: mol_type = other RNA
ttggtgactgccacgcccaagttttagagctagaaatagcaagttaaaataaggctagtccgttatcaacttgaaaaagtggcaccgagtcggtgcggtggggactgcggaggccagcagtgaacaccccttgggcgtggcagtca

SEQ ID NO: 5092 - RNA, 146 nt, synthetic construct
  misc_feature 1..146: note = Description of Artificial Sequence: Synthetic polynucleotide
  source 1..146: mol_type = other RNA
ttggtgactgccacgcccaagttttagagctagaaatagcaagttaaaataaggctagtccgttatcaacttgaaaaagtggcaccgagtcggtgctgtggtggggactgcggaggccagcagtgaacaccccttgggcgtggcag

SEQ ID NO: 5093 - RNA, 146 nt, synthetic construct
  misc_feature 1..146: note = Description of Artificial Sequence: Synthetic polynucleotide
  source 1..146: mol_type = other RNA
ttggtgactgccacgcccaagttttagagctagaaatagcaagttaaaataaggctagtccgttatcaacttgaaaaagtggcaccgagtcggtgcgtggtggggactgcggaggccagcagtgaacaccccttgggcgtggcagt

SEQ ID NO: 5094 - RNA, 146 nt, synthetic construct
  misc_feature 1..146: note = Description of Artificial Sequence: Synthetic polynucleotide
  source 1..146: mol_type = other RNA
ttggtgactgccacgcccaagttttagagctagaaatagcaagttaaaataaggctagtccgttatcaacttgaaaaagtggcaccgagtcggtgcgtggggactgcggaggccagcagtgaacaccccttgggcgtggcagtcac

SEQ ID NO: 5095 - RNA, 147 nt, synthetic construct
  misc_feature 1..147: note = Description of Artificial Sequence: Synthetic polynucleotide
  source 1..147: mol_type = other RNA
gttggtgactgccacgcccaagttttagagctagaaatagcaagttaaaataaggctagtccgttatcaacttgaaaaagtggcaccgagtcggtgcactgcggaggccagcagtgaacaccccttgggcgtggcagtcattttttt

SEQ ID NO: 5096 - RNA, 147 nt, synthetic construct
  misc_feature 1..147: note = Description of Artificial Sequence: Synthetic polynucleotide
  source 1..147: mol_type = other RNA
ttggtgactgccacgcccaagttttagagctagaaatagcaagttaaaataaggctagtccgttatcaacttgaaaaagtggcaccgagtcggtgcgtggtggggactgcggaggccagcagtgaacaccccttgggcgtggcagtc

SEQ ID NO: 5097 - RNA, 147 nt, synthetic construct
  misc_feature 1..147: note = Description of Artificial Sequence: Synthetic polynucleotide
  source 1..147: mol_type = other RNA
ttggtgactgccacgcccaagttttagagctagaaatagcaagttaaaataaggctagtccgttatcaacttgaaaaagtggcaccgagtcggtgctgtggtggggactgcggaggccagcagtgaacaccccttgggcgtggcagt

SEQ ID NO: 5098 - RNA, 147 nt, synthetic construct
  misc_feature 1..147: note = Description of Artificial Sequence: Synthetic polynucleotide
  source 1..147: mol_type = other RNA
ttggtgactgccacgcccaagttttagagctagaaatagcaagttaaaataaggctagtccgttatcaacttgaaaaagtggcaccgagtcggtgcggtggggactgcggaggccagcagtgaacaccccttgggcgtggcagtcac

SEQ ID NO: 5099 - RNA, 147 nt, synthetic construct
  misc_feature 1..147: note = Description of Artificial Sequence: Synthetic polynucleotide
  source 1..147: mol_type = other RNA
gttggtgactgccacgcccaagttttagagctagaaatagcaagttaaaataaggctagtccgttatcaacttgaaaaagtggcaccgagtcggtgcgtggggactgcggaggccagcagtgaacaccccttgggcgtggttttttt

SEQ ID NO: 5100 - RNA, 147 nt, synthetic construct
  misc_feature 1..147: note = Description of Artificial Sequence: Synthetic polynucleotide
  source 1..147: mol_type = other RNA
gttggtgactgccacgcccaagttttagagctagaaatagcaagttaaaataaggctagtccgttatcaacttgaaaaagtggcaccgagtcggtgcgggactgcggaggccagcagtgaacaccccttgggcgtggcagttttttt

SEQ ID NO: 5101 - RNA, 147 nt, synthetic construct
  misc_feature 1..147: note = Description of Artificial Sequence: Synthetic polynucleotide
  source 1..147: mol_type = other RNA
gttggtgactgccacgcccaagttttagagctagaaatagcaagttaaaataaggctagtccgttatcaacttgaaaaagtggcaccgagtcggtgcggactgcggaggccagcagtgaacaccccttgggcgtggcagtttttttt

SEQ ID NO: 5102 - RNA, 147 nt, synthetic construct
  misc_feature 1..147: note = Description of Artificial Sequence: Synthetic polynucleotide
  source 1..147: mol_type = other RNA
gttggtgactgccacgcccaagttttagagctagaaatagcaagttaaaataaggctagtccgttatcaacttgaaaaagtggcaccgagtcggtgcggggactgcggaggccagcagtgaacaccccttgggcgtggcattttttt

SEQ ID NO: 5103 - RNA, 147 nt, synthetic construct
  misc_feature 1..147: note = Description of Artificial Sequence: Synthetic polynucleotide
  source 1..147: mol_type = other RNA
ttggtgactgccacgcccaagttttagagctagaaatagcaagttaaaataaggctagtccgttatcaacttgaaaaagtggcaccgagtcggtgctggtggggactgcggaggccagcagtgaacaccccttgggcgtggcagtca

SEQ ID NO: 5104 - RNA, 147 nt, synthetic construct
  misc_feature 1..147: note = Description of Artificial Sequence: Synthetic polynucleotide
  source 1..147: mol_type = other RNA
gttggtgactgccacgcccaagttttagagctagaaatagcaagttaaaataaggctagtccgttatcaacttgaaaaagtggcaccgagtcggtgcgactgcggaggccagcagtgaacaccccttgggcgtggcagtcttttttt

SEQ ID NO: 5105 - RNA, 147 nt, synthetic construct
  misc_feature 1..147: note = Description of Artificial Sequence: Synthetic polynucleotide
  source 1..147: mol_type = other RNA
gttggtgactgccacgcccaagttttagagctagaaatagcaagttaaaataaggctagtccgttatcaacttgaaaaagtggcaccgagtcggtgctggggactgcggaggccagcagtgaacaccccttgggcgtggcttttttt

SEQ ID NO: 5106 - RNA, 148 nt, synthetic construct
  misc_feature 1..148: note = Description of Artificial Sequence: Synthetic polynucleotide
  source 1..148: mol_type = other RNA
gttggtgactgccacgcccaagttttagagctagaaatagcaagttaaaataaggctagtccgttatcaacttgaaaaagtggcaccgagtcggtgcgtggggactgcggaggccagcagtgaacaccccttgggcgtggcttttttt

SEQ ID NO: 5107 - RNA, 148 nt, synthetic construct
  misc_feature 1..148: note = Description of Artificial Sequence: Synthetic polynucleotide
  source 1..148: mol_type = other RNA
gttggtgactgccacgcccaagttttagagctagaaatagcaagttaaaataaggctagtccgttatcaacttgaaaaagtggcaccgagtcggtgcactgcggaggccagcagtgaacaccccttgggcgtggcagtcacttttttt

SEQ ID NO: 5108 - RNA, 148 nt, synthetic construct
  misc_feature 1..148: note = Description of Artificial Sequence: Synthetic polynucleotide
  source 1..148: mol_type = other RNA
gttggtgactgccacgcccaagttttagagctagaaatagcaagttaaaataaggctagtccgttatcaacttgaaaaagtggcaccgagtcggtgcggactgcggaggccagcagtgaacaccccttgggcgtggcagtcttttttt

SEQ ID NO: 5109 - RNA, 148 nt, synthetic construct
  misc_feature 1..148: note = Description of Artificial Sequence: Synthetic polynucleotide
  source 1..148: mol_type = other RNA
gttggtgactgccacgcccaagttttagagctagaaatagcaagttaaaataaggctagtccgttatcaacttgaaaaagtggcaccgagtcggtgcggtggggactgcggaggccagcagtgaacaccccttgggcgtggttttttt

SEQ ID NO: 5110 - RNA, 148 nt, synthetic construct
  misc_feature 1..148: note = Description of Artificial Sequence: Synthetic polynucleotide
  source 1..148: mol_type = other RNA
ttggtgactgccacgcccaagttttagagctagaaatagcaagttaaaataaggctagtccgttatcaacttgaaaaagtggcaccgagtcggtgctggctgtggtggggactgcggaggccagcagtgaacaccccttgggcgtggc

SEQ ID NO: 5111 - RNA, 148 nt, synthetic construct
  misc_feature 1..148: note = Description of Artificial Sequence: Synthetic polynucleotide
  source 1..148: mol_type = other RNA
ttggtgactgccacgcccaagttttagagctagaaatagcaagttaaaataaggctagtccgttatcaacttgaaaaagtggcaccgagtcggtgcgtggtggggactgcggaggccagcagtgaacaccccttgggcgtggcagtca

SEQ ID NO: 5112 - RNA, 148 nt, synthetic construct
  misc_feature 1..148: note = Description of Artificial Sequence: Synthetic polynucleotide
  source 1..148: mol_type = other RNA
ttggtgactgccacgcccaagttttagagctagaaatagcaagttaaaataaggctagtccgttatcaacttgaaaaagtggcaccgagtcggtgctggtggggactgcggaggccagcagtgaacaccccttgggcgtggcagtcac

SEQ ID NO: 5113 - RNA, 148 nt, synthetic construct
  misc_feature 1..148: note = Description of Artificial Sequence: Synthetic polynucleotide
  source 1..148: mol_type = other RNA
gttggtgactgccacgcccaagttttagagctagaaatagcaagttaaaataaggctagtccgttatcaacttgaaaaagtggcaccgagtcggtgcgggactgcggaggccagcagtgaacaccccttgggcgtggcagtttttttt

SEQ ID NO: 5114 - RNA, 148 nt, synthetic construct
  misc_feature 1..148: note = Description of Artificial Sequence: Synthetic polynucleotide
  source 1..148: mol_type = other RNA
gttggtgactgccacgcccaagttttagagctagaaatagcaagttaaaataaggctagtccgttatcaacttgaaaaagtggcaccgagtcggtgctggggactgcggaggccagcagtgaacaccccttgggcgtggcattttttt

SEQ ID NO: 5115 - RNA, 148 nt, synthetic construct
  misc_feature 1..148: note = Description of Artificial Sequence: Synthetic polynucleotide
  source 1..148: mol_type = other RNA
ttggtgactgccacgcccaagttttagagctagaaatagcaagttaaaataaggctagtccgttatcaacttgaaaaagtggcaccgagtcggtgctgtggtggggactgcggaggccagcagtgaacaccccttgggcgtggcagtc

SEQ ID NO: 5116 - RNA, 148 nt, synthetic construct
  misc_feature 1..148: note = Description of Artificial Sequence: Synthetic polynucleotide
  source 1..148: mol_type = other RNA
gttggtgactgccacgcccaagttttagagctagaaatagcaagttaaaataaggctagtccgttatcaacttgaaaaagtggcaccgagtcggtgcggggactgcggaggccagcagtgaacaccccttgggcgtggcagttttttt

SEQ ID NO: 5117 - RNA, 148 nt, synthetic construct
  misc_feature 1..148: note = Description of Artificial Sequence: Synthetic polynucleotide
  source 1..148: mol_type = other RNA
gttggtgactgccacgcccaagttttagagctagaaatagcaagttaaaataaggctagtccgttatcaacttgaaaaagtggcaccgagtcggtgcgactgcggaggccagcagtgaacaccccttgggcgtggcagtcattttttt

SEQ ID NO: 5118 - RNA, 149 nt, synthetic construct
  misc_feature 1..149: note = Description of Artificial Sequence: Synthetic polynucleotide
  source 1..149: mol_type = other RNA
gttggtgactgccacgcccaagttttagagctagaaatagcaagttaaaataaggctagtccgttatcaacttgaaaaagtggcaccgagtcggtgctggtggggactgcggaggccagcagtgaacaccccttgggcgtggttttttt

SEQ ID NO: 5119 - RNA, 149 nt, synthetic construct
  misc_feature 1..149: note = Description of Artificial Sequence: Synthetic polynucleotide
  source 1..149: mol_type = other RNA
ttggtgactgccacgcccaagttttagagctagaaatagcaagttaaaataaggctagtccgttatcaacttgaaaaagtggcaccgagtcggtgctgtggtggggactgcggaggccagcagtgaacaccccttgggcgtggcagtca

SEQ ID NO: 5120 - RNA, 149 nt, synthetic construct
  misc_feature 1..149: note = Description of Artificial Sequence: Synthetic polynucleotide
  source 1..149: mol_type = other RNA
gttggtgactgccacgcccaagttttagagctagaaatagcaagttaaaataaggctagtccgttatcaacttgaaaaagtggcaccgagtcggtgcggactgcggaggccagcagtgaacaccccttgggcgtggcagtcattttttt

SEQ ID NO: 5121 - RNA, 149 nt, synthetic construct
  misc_feature 1..149: note = Description of Artificial Sequence: Synthetic polynucleotide
  source 1..149: mol_type = other RNA
gttggtgactgccacgcccaagttttagagctagaaatagcaagttaaaataaggctagtccgttatcaacttgaaaaagtggcaccgagtcggtgctggggactgcggaggccagcagtgaacaccccttgggcgtggcagttttttt

SEQ ID NO: 5122 - RNA, 149 nt, synthetic construct
  misc_feature 1..149: note = Description of Artificial Sequence: Synthetic polynucleotide
  source 1..149: mol_type = other RNA
gttggtgactgccacgcccaagttttagagctagaaatagcaagttaaaataaggctagtccgttatcaacttgaaaaagtggcaccgagtcggtgcgactgcggaggccagcagtgaacaccccttgggcgtggcagtcacttttttt

SEQ ID NO: 5123 - RNA, 149 nt, synthetic construct
  misc_feature 1..149: note = Description of Artificial Sequence: Synthetic polynucleotide
  source 1..149: mol_type = other RNA
ttggtgactgccacgcccaagttttagagctagaaatagcaagttaaaataaggctagtccgttatcaacttgaaaaagtggcaccgagtcggtgcgtggtggggactgcggaggccagcagtgaacaccccttgggcgtggcagtcac

SEQ ID NO: 5124 - RNA, 149 nt, synthetic construct
  misc_feature 1..149: note = Description of Artificial Sequence: Synthetic polynucleotide
  source 1..149: mol_type = other RNA
gttggtgactgccacgcccaagttttagagctagaaatagcaagttaaaataaggctagtccgttatcaacttgaaaaagtggcaccgagtcggtgcgtggggactgcggaggccagcagtgaacaccccttgggcgtggcattttttt

SEQ ID NO: 5125 - RNA, 149 nt, synthetic construct
  misc_feature 1..149: note = Description of Artificial Sequence: Synthetic polynucleotide
  source 1..149: mol_type = other RNA
gttggtgactgccacgcccaagttttagagctagaaatagcaagttaaaataaggctagtccgttatcaacttgaaaaagtggcaccgagtcggtgcggtggggactgcggaggccagcagtgaacaccccttgggcgtggcttttttt

SEQ ID NO: 5126 - RNA, 149 nt, synthetic construct
  misc_feature 1..149: note = Description of Artificial Sequence: Synthetic polynucleotide
  source 1..149: mol_type = other RNA
gttggtgactgccacgcccaagttttagagctagaaatagcaagttaaaataaggctagtccgttatcaacttgaaaaagtggcaccgagtcggtgcggggactgcggaggccagcagtgaacaccccttgggcgtggcagtttttttt

SEQ ID NO: 5127 - RNA, 149 nt, synthetic construct
  misc_feature 1..149: note = Description of Artificial Sequence: Synthetic polynucleotide
  source 1..149: mol_type = other RNA
gttggtgactgccacgcccaagttttagagctagaaatagcaagttaaaataaggctagtccgttatcaacttgaaaaagtggcaccgagtcggtgcgggactgcggaggccagcagtgaacaccccttgggcgtggcagtcttttttt

SEQ ID NO: 5128 - RNA, 150 nt, synthetic construct
  misc_feature 1..150: note = Description of Artificial Sequence: Synthetic polynucleotide
  source 1..150: mol_type = other RNA
gttggtgactgccacgcccaagttttagagctagaaatagcaagttaaaataaggctagtccgttatcaacttgaaaaagtggcaccgagtcggtgcgtggggactgcggaggccagcagtgaacaccccttgggcgtggcagttttttt

SEQ ID NO: 5129 - RNA, 150 nt, synthetic construct
  misc_feature 1..150: note = Description of Artificial Sequence: Synthetic polynucleotide
  source 1..150: mol_type = other RNA
gttggtgactgccacgcccaagttttagagctagaaatagcaagttaaaataaggctagtccgttatcaacttgaaaaagtggcaccgagtcggtgcggtggggactgcggaggccagcagtgaacaccccttgggcgtggcattttttt

SEQ ID NO: 5130 - RNA, 150 nt, synthetic construct
  misc_feature 1..150: note = Description of Artificial Sequence: Synthetic polynucleotide
  source 1..150: mol_type = other RNA
gttggtgactgccacgcccaagttttagagctagaaatagcaagttaaaataaggctagtccgttatcaacttgaaaaagtggcaccgagtcggtgcgtggtggggactgcggaggccagcagtgaacaccccttgggcgtggttttttt

SEQ ID NO: 5131 - RNA, 150 nt, synthetic construct
  misc_feature 1..150: note = Description of Artificial Sequence: Synthetic polynucleotide
  source 1..150: mol_type = other RNA
gttggtgactgccacgcccaagttttagagctagaaatagcaagttaaaataaggctagtccgttatcaacttgaaaaagtggcaccgagtcggtgcgggactgcggaggccagcagtgaacaccccttgggcgtggcagtcattttttt

SEQ ID NO: 5132 - RNA, 150 nt, synthetic construct
  misc_feature 1..150: note = Description of Artificial Sequence: Synthetic polynucleotide
  source 1..150: mol_type = other RNA
ttggtgactgccacgcccaagttttagagctagaaatagcaagttaaaataaggctagtccgttatcaacttgaaaaagtggcaccgagtcggtgcgctgtggtggggactgcggaggccagcagtgaacaccccttgggcgtggcagtc

SEQ ID NO: 5133 - RNA, 150 nt, synthetic construct
  misc_feature 1..150: note = Description of Artificial Sequence: Synthetic polynucleotide
  source 1..150: mol_type = other RNA
gttggtgactgccacgcccaagttttagagctagaaatagcaagttaaaataaggctagtccgttatcaacttgaaaaagtggcaccgagtcggtgctggggactgcggaggccagcagtgaacaccccttgggcgtggcagtttttttt

SEQ ID NO: 5134 - RNA, 150 nt, synthetic construct
  misc_feature 1..150: note = Description of Artificial Sequence: Synthetic polynucleotide
  source 1..150: mol_type = other RNA
gttggtgactgccacgcccaagttttagagctagaaatagcaagttaaaataaggctagtccgttatcaacttgaaaaagtggcaccgagtcggtgcggactgcggaggccagcagtgaacaccccttgggcgtggcagtcacttttttt

SEQ ID NO: 5135 - RNA, 150 nt, synthetic construct
  misc_feature 1..150: note = Description of Artificial Sequence: Synthetic polynucleotide
  source 1..150: mol_type = other RNA
ttggtgactgccacgcccaagttttagagctagaaatagcaagttaaaataaggctagtccgttatcaacttgaaaaagtggcaccgagtcggtgctctggctgtggtggggactgcggaggccagcagtgaacaccccttgggcgtggc

SEQ ID NO: 5136 - RNA, 150 nt, synthetic construct
  misc_feature 1..150: note = Description of Artificial Sequence: Synthetic polynucleotide
  source 1..150: mol_type = other RNA
gttggtgactgccacgcccaagttttagagctagaaatagcaagttaaaataaggctagtccgttatcaacttgaaaaagtggcaccgagtcggtgctggtggggactgcggaggccagcagtgaacaccccttgggcgtggcttttttt

SEQ ID NO: 5137 - RNA, 150 nt, synthetic construct
  misc_feature 1..150: note = Description of Artificial Sequence: Synthetic polynucleotide
  source 1..150: mol_type = other RNA
gttggtgactgccacgcccaagttttagagctagaaatagcaagttaaaataaggctagtccgttatcaacttgaaaaagtggcaccgagtcggtgcggggactgcggaggccagcagtgaacaccccttgggcgtggcagtcttttttt

SEQ ID NO: 5138 - RNA, 150 nt, synthetic construct
  misc_feature 1..150: note = Description of Artificial Sequence: Synthetic polynucleotide
  source 1..150: mol_type = other RNA
ttggtgactgccacgcccaagttttagagctagaaatagcaagttaaaataaggctagtccgttatcaacttgaaaaagtggcaccgagtcggtgctgtggtggggactgcggaggccagcagtgaacaccccttgggcgtggcagtcac

SEQ ID NO: 5139 - RNA, 151 nt, synthetic construct
  misc_feature 1..151: note = Description of Artificial Sequence: Synthetic polynucleotide
  source 1..151: mol_type = other RNA
gttggtgactgccacgcccaagttttagagctagaaatagcaagttaaaataaggctagtccgttatcaacttgaaaaagtggcaccgagtcggtgctggggactgcggaggccagcagtgaacaccccttgggcgtggcagtcttttttt

SEQ ID NO: 5140 - RNA, 151 nt, synthetic construct
  misc_feature 1..151: note = Description of Artificial Sequence: Synthetic polynucleotide
  source 1..151: mol_type = other RNA
gttggtgactgccacgcccaagttttagagctagaaatagcaagttaaaataaggctagtccgttatcaacttgaaaaagtggcaccgagtcggtgcggtggggactgcggaggccagcagtgaacaccccttgggcgtggcagttttttt

SEQ ID NO: 5141 - RNA, 151 nt, synthetic construct
  misc_feature 1..151: note = Description of Artificial Sequence: Synthetic polynucleotide
  source 1..151: mol_type = other RNA
gttggtgactgccacgcccaagttttagagctagaaatagcaagttaaaataaggctagtccgttatcaacttgaaaaagtggcaccgagtcggtgcgggactgcggaggccagcagtgaacaccccttgggcgtggcagtcacttttttt

SEQ ID NO: 5142 - RNA, 151 nt, synthetic construct
  misc_feature 1..151: note = Description of Artificial Sequence: Synthetic polynucleotide
  source 1..151: mol_type = other RNA
gttggtgactgccacgcccaagttttagagctagaaatagcaagttaaaataaggctagtccgttatcaacttgaaaaagtggcaccgagtcggtgcggggactgcggaggccagcagtgaacaccccttgggcgtggcagtcattttttt

SEQ ID NO: 5143 - RNA, 151 nt, synthetic construct
  misc_feature 1..151: note = Description of Artificial Sequence: Synthetic polynucleotide
  source 1..151: mol_type = other RNA
gttggtgactgccacgcccaagttttagagctagaaatagcaagttaaaataaggctagtccgttatcaacttgaaaaagtggcaccgagtcggtgctgtggtggggactgcggaggccagcagtgaacaccccttgggcgtggttttttt

SEQ ID NO: 5144 - RNA, 151 nt, synthetic construct
  misc_feature 1..151: note = Description of Artificial Sequence: Synthetic polynucleotide
  source 1..151: mol_type = other RNA
gttggtgactgccacgcccaagttttagagctagaaatagcaagttaaaataaggctagtccgttatcaacttgaaaaagtggcaccgagtcggtgctggtggggactgcggaggccagcagtgaacaccccttgggcgtggcattttttt

SEQ ID NO: 5145 - RNA, 151 nt, synthetic construct
  misc_feature 1..151: note = Description of Artificial Sequence: Synthetic polynucleotide
  source 1..151: mol_type = other RNA
gttggtgactgccacgcccaagttttagagctagaaatagcaagttaaaataaggctagtccgttatcaacttgaaaaagtggcaccgagtcggtgcgtggggactgcggaggccagcagtgaacaccccttgggcgtggcagtttttttt

SEQ ID NO: 5146 - RNA, 151 nt, synthetic construct
  misc_feature 1..151: note = Description of Artificial Sequence: Synthetic polynucleotide
  source 1..151: mol_type = other RNA
gttggtgactgccacgcccaagttttagagctagaaatagcaagttaaaataaggctagtccgttatcaacttgaaaaagtggcaccgagtcggtgcgtggtggggactgcggaggccagcagtgaacaccccttgggcgtggcttttttt

SEQ ID NO: 5147 - RNA, 152 nt, synthetic construct
  misc_feature 1..152: note = Description of Artificial Sequence: Synthetic polynucleotide
  source 1..152: mol_type = other RNA
ttggtgactgccacgcccaagttttagagctagaaatagcaagttaaaataaggctagtccgttatcaacttgaaaaagtggcaccgagtcggtgctggctgtggtggggactgcggaggccagcagtgaacaccccttgggcgtggcagtc

SEQ ID NO: 5148 - RNA, 152 nt, synthetic construct
  misc_feature 1..152: note = Description of Artificial Sequence: Synthetic polynucleotide
  source 1..152: mol_type = other RNA
gttggtgactgccacgcccaagttttagagctagaaatagcaagttaaaataaggctagtccgttatcaacttgaaaaagtggcaccgagtcggtgcggtggggactgcggaggccagcagtgaacaccccttgggcgtggcagtttttttt

SEQ ID NO: 5149 - RNA, 152 nt, synthetic construct
  misc_feature 1..152: note = Description of Artificial Sequence: Synthetic polynucleotide
  source 1..152: mol_type = other RNA
gttggtgactgccacgcccaagttttagagctagaaatagcaagttaaaataaggctagtccgttatcaacttgaaaaagtggcaccgagtcggtgcggggactgcggaggccagcagtgaacaccccttgggcgtggcagtcacttttttt

SEQ ID NO: 5150 - RNA, 152 nt, synthetic construct
  misc_feature 1..152: note = Description of Artificial Sequence: Synthetic polynucleotide
  source 1..152: mol_type = other RNA
gttggtgactgccacgcccaagttttagagctagaaatagcaagttaaaataaggctagtccgttatcaacttgaaaaagtggcaccgagtcggtgcgtggtggggactgcggaggccagcagtgaacaccccttgggcgtggcattttttt

SEQ ID NO: 5151 - RNA, 152 nt, synthetic construct
  misc_feature 1..152: note = Description of Artificial Sequence: Synthetic polynucleotide
  source 1..152: mol_type = other RNA
ttggtgactgccacgcccaagttttagagctagaaatagcaagttaaaataaggctagtccgttatcaacttgaaaaagtggcaccgagtcggtgcgttctggctgtggtggggactgcggaggccagcagtgaacaccccttgggcgtggc

SEQ ID NO: 5152 - RNA, 152 nt, synthetic construct
  misc_feature 1..152: note = Description of Artificial Sequence: Synthetic polynucleotide
  source 1..152: mol_type = other RNA
gttggtgactgccacgcccaagttttagagctagaaatagcaagttaaaataaggctagtccgttatcaacttgaaaaagtggcaccgagtcggtgctgtggtggggactgcggaggccagcagtgaacaccccttgggcgtggcttttttt

SEQ ID NO: 5153 - RNA, 152 nt, synthetic construct
  misc_feature 1..152: note = Description of Artificial Sequence: Synthetic polynucleotide
  source 1..152: mol_type = other RNA
gttggtgactgccacgcccaagttttagagctagaaatagcaagttaaaataaggctagtccgttatcaacttgaaaaagtggcaccgagtcggtgctggtggggactgcggaggccagcagtgaacaccccttgggcgtggcagttttttt

SEQ ID NO: 5154 - RNA, 152 nt, synthetic construct
  misc_feature 1..152: note = Description of Artificial Sequence: Synthetic polynucleotide
  source 1..152: mol_type = other RNA
gttggtgactgccacgcccaagttttagagctagaaatagcaagttaaaataaggctagtccgttatcaacttgaaaaagtggcaccgagtcggtgctggggactgcggaggccagcagtgaacaccccttgggcgtggcagtcattttttt

SEQ ID NO: 5155 - RNA, 152 nt, synthetic construct
  misc_feature 1..152: note = Description of Artificial Sequence: Synthetic polynucleotide
  source 1..152: mol_type = other RNA
gttggtgactgccacgcccaagttttagagctagaaatagcaagttaaaataaggctagtccgttatcaacttgaaaaagtggcaccgagtcggtgcgtggggactgcggaggccagcagtgaacaccccttgggcgtggcagtcttttttt

SEQ ID NO: 5156 - RNA, 153 nt, synthetic construct
  misc_feature 1..153: note = Description of Artificial Sequence: Synthetic polynucleotide
  source 1..153: mol_type = other RNA
gttggtgactgccacgcccaagttttagagctagaaatagcaagttaaaataaggctagtccgttatcaacttgaaaaagtggcaccgagtcggtgcgtggggactgcggaggccagcagtgaacaccccttgggcgtggcagtcattttttt

SEQ ID NO: 5157 - RNA, 153 nt, synthetic construct
  misc_feature 1..153: note = Description of Artificial Sequence: Synthetic polynucleotide
  source 1..153: mol_type = other RNA
gttggtgactgccacgcccaagttttagagctagaaatagcaagttaaaataaggctagtccgttatcaacttgaaaaagtggcaccgagtcggtgctgtggtggggactgcggaggccagcagtgaacaccccttgggcgtggcattttttt

SEQ ID NO: 5158 - RNA, 153 nt, synthetic construct
  misc_feature 1..153: note = Description of Artificial Sequence: Synthetic polynucleotide
  source 1..153: mol_type = other RNA
gttggtgactgccacgcccaagttttagagctagaaatagcaagttaaaataaggctagtccgttatcaacttgaaaaagtggcaccgagtcggtgctggtggggactgcggaggccagcagtgaacaccccttgggcgtggcagtttttttt

SEQ ID NO: 5159 - RNA, 153 nt, synthetic construct
  misc_feature 1..153: note = Description of Artificial Sequence: Synthetic polynucleotide
  source 1..153: mol_type = other RNA
gttggtgactgccacgcccaagttttagagctagaaatagcaagttaaaataaggctagtccgttatcaacttgaaaaagtggcaccgagtcggtgcgtggtggggactgcggaggccagcagtgaacaccccttgggcgtggcagttttttt

SEQ ID NO: 5160 - RNA, 153 nt, synthetic construct
  misc_feature 1..153: note = Description of Artificial Sequence: Synthetic polynucleotide
  source 1..153: mol_type = other RNA
gttggtgactgccacgcccaagttttagagctagaaatagcaagttaaaataaggctagtccgttatcaacttgaaaaagtggcaccgagtcggtgcggtggggactgcggaggccagcagtgaacaccccttgggcgtggcagtcttttttt

SEQ ID NO: 5161 - RNA, 153 nt, synthetic construct
  misc_feature 1..153: note = Description of Artificial Sequence: Synthetic polynucleotide
  source 1..153: mol_type = other RNA
gttggtgactgccacgcccaagttttagagctagaaatagcaagttaaaataaggctagtccgttatcaacttgaaaaagtggcaccgagtcggtgctggggactgcggaggccagcagtgaacaccccttgggcgtggcagtcacttttttt

SEQ ID NO: 5162 - RNA, 154 nt, synthetic construct
  misc_feature 1..154: note = Description of Artificial Sequence: Synthetic polynucleotide
  source 1..154: mol_type = other RNA
gttggtgactgccacgcccaagttttagagctagaaatagcaagttaaaataaggctagtccgttatcaacttgaaaaagtggcaccgagtcggtgctggtggggactgcggaggccagcagtgaacaccccttgggcgtggcagtcttttttt

SEQ ID NO: 5163 - RNA, 154 nt, synthetic construct
  misc_feature 1..154: note = Description of Artificial Sequence: Synthetic polynucleotide
  source 1..154: mol_type = other RNA
gttggtgactgccacgcccaagttttagagctagaaatagcaagttaaaataaggctagtccgttatcaacttgaaaaagtggcaccgagtcggtgctgtggtggggactgcggaggccagcagtgaacaccccttgggcgtggcagttttttt

SEQ ID NO: 5164 - RNA, 154 nt, synthetic construct
  misc_feature 1..154: note = Description of Artificial Sequence: Synthetic polynucleotide
  source 1..154: mol_type = other RNA
ttggtgactgccacgcccaagttttagagctagaaatagcaagttaaaataaggctagtccgttatcaacttgaaaaagtggcaccgagtcggtgctctggctgtggtggggactgcggaggccagcagtgaacaccccttgggcgtggcagtc

SEQ ID NO: 5165 - RNA, 154 nt, synthetic construct
  misc_feature 1..154: note = Description of Artificial Sequence: Synthetic polynucleotide
  source 1..154: mol_type = other RNA
gttggtgactgccacgcccaagttttagagctagaaatagcaagttaaaataaggctagtccgttatcaacttgaaaaagtggcaccgagtcggtgcgtggggactgcggaggccagcagtgaacaccccttgggcgtggcagtcacttttttt

SEQ ID NO: 5166 - RNA, 154 nt, synthetic construct
  misc_feature 1..154: note = Description of Artificial Sequence: Synthetic polynucleotide
  source 1..154: mol_type = other RNA
gttggtgactgccacgcccaagttttagagctagaaatagcaagttaaaataaggctagtccgttatcaacttgaaaaagtggcaccgagtcggtgcggtggggactgcggaggccagcagtgaacaccccttgggcgtggcagtcattttttt

SEQ ID NO: 5167 - RNA, 154 nt, synthetic construct
  misc_feature 1..154: note = Description of Artificial Sequence: Synthetic polynucleotide
  source 1..154: mol_type = other RNA
ttggtgactgccacgcccaagttttagagctagaaatagcaagttaaaataaggctagtccgttatcaacttgaaaaagtggcaccgagtcggtgcaggttctggctgtggtggggactgcggaggccagcagtgaacaccccttgggcgtggc

SEQ ID NO: 5168 - RNA, 154 nt, synthetic construct
  misc_feature 1..154: note = Description of Artificial Sequence: Synthetic polynucleotide
  source 1..154: mol_type = other RNA
gttggtgactgccacgcccaagttttagagctagaaatagcaagttaaaataaggctagtccgttatcaacttgaaaaagtggcaccgagtcggtgcgtggtggggactgcggaggccagcagtgaacaccccttgggcgtggcagtttttttt

SEQ ID NO: 5169 - RNA, 155 nt, synthetic construct
  misc_feature 1..155: note = Description of Artificial Sequence: Synthetic polynucleotide
  source 1..155: mol_type = other RNA
gttggtgactgccacgcccaagttttagagctagaaatagcaagttaaaataaggctagtccgttatcaacttgaaaaagtggcaccgagtcggtgctggtggggactgcggaggccagcagtgaacaccccttgggcgtggcagtcattttttt

SEQ ID NO: 5170 - RNA, 155 nt, synthetic construct
  misc_feature 1..155: note = Description of Artificial Sequence: Synthetic polynucleotide
  source 1..155: mol_type = other RNA
gttggtgactgccacgcccaagttttagagctagaaatagcaagttaaaataaggctagtccgttatcaacttgaaaaagtggcaccgagtcggtgcggtggggactgcggaggccagcagtgaacaccccttgggcgtggcagtcacttttttt

SEQ ID NO: 5171 - RNA, 155 nt, synthetic construct
  misc_feature 1..155: note = Description of Artificial Sequence: Synthetic polynucleotide
  source 1..155: mol_type = other RNA
gttggtgactgccacgcccaagttttagagctagaaatagcaagttaaaataaggctagtccgttatcaacttgaaaaagtggcaccgagtcggtgctgtggtggggactgcggaggccagcagtgaacaccccttgggcgtggcagtttttttt

SEQ ID NO: 5172 - RNA, 155 nt, synthetic construct
  misc_feature 1..155: note = Description of Artificial Sequence: Synthetic polynucleotide
  source 1..155: mol_type = other RNA
gttggtgactgccacgcccaagttttagagctagaaatagcaagttaaaataaggctagtccgttatcaacttgaaaaagtggcaccgagtcggtgcgtggtggggactgcggaggccagcagtgaacaccccttgggcgtggcagtcttttttt

SEQ ID NO: 5173 - RNA, 156 nt, synthetic construct
  misc_feature 1..156: note = Description of Artificial Sequence: Synthetic polynucleotide
  source 1..156: mol_type = other RNA
gttggtgactgccacgcccaagttttagagctagaaatagcaagttaaaataaggctagtccgttatcaacttgaaaaagtggcaccgagtcggtgctggtggggactgcggaggccagcagtgaacaccccttgggcgtggcagtcacttttttt

SEQ ID NO: 5174 - RNA, 156 nt, synthetic construct
  misc_feature 1..156: note = Description of Artificial Sequence: Synthetic polynucleotide
  source 1..156: mol_type = other RNA
gttggtgactgccacgcccaagttttagagctagaaatagcaagttaaaataaggctagtccgttatcaacttgaaaaagtggcaccgagtcggtgctgtggtggggactgcggaggccagcagtgaacaccccttgggcgtggcagtcttttttt

SEQ ID NO: 5175 - RNA, 156 nt, synthetic construct
  misc_feature 1..156: note = Description of Artificial Sequence: Synthetic polynucleotide
  source 1..156: mol_type = other RNA
ttggtgactgccacgcccaagttttagagctagaaatagcaagttaaaataaggctagtccgttatcaacttgaaaaagtggcaccgagtcggtgcgaaggttctggctgtggtggggactgcggaggccagcagtgaacaccccttgggcgtggc

SEQ ID NO: 5176 - RNA, 156 nt, synthetic construct
  misc_feature 1..156: note = Description of Artificial Sequence: Synthetic polynucleotide
  source 1..156: mol_type = other RNA
ttggtgactgccacgcccaagttttagagctagaaatagcaagttaaaataaggctagtccgttatcaacttgaaaaagtggcaccgagtcggtgcgttctggctgtggtggggactgcggaggccagcagtgaacaccccttgggcgtggcagtc

SEQ ID NO: 5177 - RNA, 156 nt, synthetic construct
  misc_feature 1..156: note = Description of Artificial Sequence: Synthetic polynucleotide
  source 1..156: mol_type = other RNA
gttggtgactgccacgcccaagttttagagctagaaatagcaagttaaaataaggctagtccgttatcaacttgaaaaagtggcaccgagtcggtgcgtggtggggactgcggaggccagcagtgaacaccccttgggcgtggcagtcattttttt

SEQ ID NO: 5178 - RNA, 157 nt, synthetic construct
  misc_feature 1..157: note = Description of Artificial Sequence: Synthetic polynucleotide
  source 1..157: mol_type = other RNA
gttggtgactgccacgcccaagttttagagctagaaatagcaagttaaaataaggctagtccgttatcaacttgaaaaagtggcaccgagtcggtgcgtggtggggactgcggaggccagcagtgaacaccccttgggcgtggcagtcacttttttt

SEQ ID NO: 5179 - RNA, 157 nt, synthetic construct
  misc_feature 1..157: note = Description of Artificial Sequence: Synthetic polynucleotide
  source 1..157: mol_type = other RNA
gttggtgactgccacgcccaagttttagagctagaaatagcaagttaaaataaggctagtccgttatcaacttgaaaaagtggcaccgagtcggtgctgtggtggggactgcggaggccagcagtgaacaccccttgggcgtggcagtcattttttt

SEQ ID NO: 5180 - RNA, 158 nt, synthetic construct
  misc_feature 1..158: note = Description of Artificial Sequence: Synthetic polynucleotide
  source 1..158: mol_type = other RNA
ttggtgactgccacgcccaagttttagagctagaaatagcaagttaaaataaggctagtccgttatcaacttgaaaaagtggcaccgagtcggtgcaggaaggttctggctgtggtggggactgcggaggccagcagtgaacaccccttgggcgtggc

SEQ ID NO: 5181 - RNA, 158 nt, synthetic construct
  misc_feature 1..158: note = Description of Artificial Sequence: Synthetic polynucleotide
  source 1..158: mol_type = other RNA
ttggtgactgccacgcccaagttttagagctagaaatagcaagttaaaataaggctagtccgttatcaacttgaaaaagtggcaccgagtcggtgcaggttctggctgtggtggggactgcggaggccagcagtgaacaccccttgggcgtggcagtc

SEQ ID NO: 5182 - RNA, 158 nt, synthetic construct
  misc_feature 1..158: note = Description of Artificial Sequence: Synthetic polynucleotide
  source 1..158: mol_type = other RNA
gttggtgactgccacgcccaagttttagagctagaaatagcaagttaaaataaggctagtccgttatcaacttgaaaaagtggcaccgagtcggtgctgtggtggggactgcggaggccagcagtgaacaccccttgggcgtggcagtcacttttttt

SEQ ID NO: 5183 - RNA, 160 nt, synthetic construct
  misc_feature 1..160: note = Description of Artificial Sequence: Synthetic polynucleotide
  source 1..160: mol_type = other RNA
ttggtgactgccacgcccaagttttagagctagaaatagcaagttaaaataaggctagtccgttatcaacttgaaaaagtggcaccgagtcggtgcgaaggttctggctgtggtggggactgcggaggccagcagtgaacaccccttgggcgtggcagtc

SEQ ID NO: 5184 - RNA, 160 nt, synthetic construct
  misc_feature 1..160: note = Description of Artificial Sequence: Synthetic polynucleotide
  source 1..160: mol_type = other RNA
ttggtgactgccacgcccaagttttagagctagaaatagcaagttaaaataaggctagtccgttatcaacttgaaaaagtggcaccgagtcggtgctcaggaaggttctggctgtggtggggactgcggaggccagcagtgaacaccccttgggcgtggc

SEQ ID NO: 5185 - RNA, 162 nt, synthetic construct
  misc_feature 1..162: note = Description of Artificial Sequence: Synthetic polynucleotide
  source 1..162: mol_type = other RNA
ttggtgactgccacgcccaagttttagagctagaaatagcaagttaaaataaggctagtccgttatcaacttgaaaaagtggcaccgagtcggtgccctcaggaaggttctggctgtggtggggactgcggaggccagcagtgaacaccccttgggcgtggc

SEQ ID NO: 5186 - RNA, 162 nt, synthetic construct
  misc_feature 1..162: note = Description of Artificial Sequence: Synthetic polynucleotide
  source 1..162: mol_type = other RNA
ttggtgactgccacgcccaagttttagagctagaaatagcaagttaaaataaggctagtccgttatcaacttgaaaaagtggcaccgagtcggtgcaggaaggttctggctgtggtggggactgcggaggccagcagtgaacaccccttgggcgtggcagtc

SEQ ID NO: 5187 - RNA, 164 nt, synthetic construct
  misc_feature 1..164: note = Description of Artificial Sequence: Synthetic polynucleotide
  source 1..164: mol_type = other RNA
ttggtgactgccacgcccaagttttagagctagaaatagcaagttaaaataaggctagtccgttatcaacttgaaaaagtggcaccgagtcggtgccccctcaggaaggttctggctgtggtggggactgcggaggccagcagtgaacaccccttgggcgtggc

SEQ ID NO: 5188 - RNA, 164 nt, synthetic construct
  misc_feature 1..164: note = Description of Artificial Sequence: Synthetic polynucleotide
  source 1..164: mol_type = other RNA
ttggtgactgccacgcccaagttttagagctagaaatagcaagttaaaataaggctagtccgttatcaacttgaaaaagtggcaccgagtcggtgctcaggaaggttctggctgtggtggggactgcggaggccagcagtgaacaccccttgggcgtggcagtc

SEQ ID NO: 5189 - RNA, 166 nt, synthetic construct
  misc_feature 1..166: note = Description of Artificial Sequence: Synthetic polynucleotide
  source 1..166: mol_type = other RNA
ttggtgactgccacgcccaagttttagagctagaaatagcaagttaaaataaggctagtccgttatcaacttgaaaaagtggcaccgagtcggtgctgcccctcaggaaggttctggctgtggtggggactgcggaggccagcagtgaacaccccttgggcgtggc

SEQ ID NO: 5190 - RNA, 166 nt, synthetic construct
  misc_feature 1..166: note = Description of Artificial Sequence: Synthetic polynucleotide
  source 1..166: mol_type = other RNA
ttggtgactgccacgcccaagttttagagctagaaatagcaagttaaaataaggctagtccgttatcaacttgaaaaagtggcaccgagtcggtgccctcaggaaggttctggctgtggtggggactgcggaggccagcagtgaacaccccttgggcgtggcagtc

SEQ ID NO: 5191 - RNA, 168 nt, synthetic construct
  misc_feature 1..168: note = Description of Artificial Sequence: Synthetic polynucleotide
  source 1..168: mol_type = other RNA
ttggtgactgccacgcccaagttttagagctagaaatagcaagttaaaataaggctagtccgttatcaacttgaaaaagtggcaccgagtcggtgccccctcaggaaggttctggctgtggtggggactgcggaggccagcagtgaacaccccttgggcgtggcagtc

SEQ ID NO: 5192 - RNA, 168 nt, synthetic construct
  misc_feature 1..168: note = Description of Artificial Sequence: Synthetic polynucleotide
  source 1..168: mol_type = other RNA
ttggtgactgccacgcccaagttttagagctagaaatagcaagttaaaataaggctagtccgttatcaacttgaaaaagtggcaccgagtcggtgcactgcccctcaggaaggttctggctgtggtggggactgcggaggccagcagtgaacaccccttgggcgtggc

SEQ ID NO: 5193 - RNA, 170 nt, synthetic construct
  misc_feature 1..170: note = Description of Artificial Sequence: Synthetic polynucleotide
  source 1..170: mol_type = other RNA
ttggtgactgccacgcccaagttttagagctagaaatagcaagttaaaataaggctagtccgttatcaacttgaaaaagtggcaccgagtcggtgctgcccctcaggaaggttctggctgtggtggggactgcggaggccagcagtgaacaccccttgggcgtggcagtc

SEQ ID NO: 5194 - RNA, 170 nt, synthetic construct
  misc_feature 1..170: note = Description of Artificial Sequence: Synthetic polynucleotide
  source 1..170: mol_type = other RNA
ttggtgactgccacgcccaagttttagagctagaaatagcaagttaaaataaggctagtccgttatcaacttgaaaaagtggcaccgagtcggtgcacactgcccctcaggaaggttctggctgtggtggggactgcggaggccagcagtgaacaccccttgggcgtggc

SEQ ID NO: 5195 - RNA, 172 nt, synthetic construct
  misc_feature 1..172: note = Description of Artificial Sequence: Synthetic polynucleotide
  source 1..172: mol_type = other RNA
ttggtgactgccacgcccaagttttagagctagaaatagcaagttaaaataaggctagtccgttatcaacttgaaaaagtggcaccgagtcggtgcccacactgcccctcaggaaggttctggctgtggtggggactgcggaggccagcagtgaacaccccttgggcgtggc

SEQ ID NO: 5196 - RNA, 172 nt, synthetic construct
  misc_feature 1..172: note = Description of Artificial Sequence: Synthetic polynucleotide
  source 1..172: mol_type = other RNA
ttggtgactgccacgcccaagttttagagctagaaatagcaagttaaaataaggctagtccgttatcaacttgaaaaagtggcaccgagtcggtgcactgcccctcaggaaggttctggctgtggtggggactgcggaggccagcagtgaacaccccttgggcgtggcagtc

SEQ ID NO: 5197 - RNA, 174 nt, synthetic construct
  misc_feature 1..174: note = Description of Artificial Sequence: Synthetic polynucleotide
  source 1..174: mol_type = other RNA
ttggtgactgccacgcccaagttttagagctagaaatagcaagttaaaataaggctagtccgttatcaacttgaaaaagtggcaccgagtcggtgcggccacactgcccctcaggaaggttctggctgtggtggggactgcggaggccagcagtgaacaccccttgggcgtggc

SEQ ID NO: 5198 - RNA, 174 nt, synthetic construct
  misc_feature 1..174: note = Description of Artificial Sequence: Synthetic polynucleotide
  source 1..174: mol_type = other RNA
ttggtgactgccacgcccaagttttagagctagaaatagcaagttaaaataaggctagtccgttatcaacttgaaaaagtggcaccgagtcggtgcacactgcccctcaggaaggttctggctgtggtggggactgcggaggccagcagtgaacaccccttgggcgtggcagtc

SEQ ID NO: 5199 - RNA, 176 nt, synthetic construct
  misc_feature 1..176: note = Description of Artificial Sequence: Synthetic polynucleotide
  source 1..176: mol_type = other RNA
ttggtgactgccacgcccaagttttagagctagaaatagcaagttaaaataaggctagtccgttatcaacttgaaaaagtggcaccgagtcggtgcccacactgcccctcaggaaggttctggctgtggtggggactgcggaggccagcagtgaacaccccttgggcgtggcagtc

SEQ ID NO: 5200 - RNA, 176 nt, synthetic construct
  misc_feature 1..176: note = Description of Artificial Sequence: Synthetic polynucleotide
  source 1..176: mol_type = other RNA
ttggtgactgccacgcccaagttttagagctagaaatagcaagttaaaataaggctagtccgttatcaacttgaaaaagtggcaccgagtcggtgcgtggccacactgcccctcaggaaggttctggctgtggtggggactgcggaggccagcagtgaacaccccttgggcgtggc

SEQ ID NO: 5201 - RNA, 178 nt, synthetic construct
  misc_feature 1..178: note = Description of Artificial Sequence: Synthetic polynucleotide
  source 1..178: mol_type = other RNA
ttggtgactgccacgcccaagttttagagctagaaatagcaagttaaaataaggctagtccgttatcaacttgaaaaagtggcaccgagtcggtgcggccacactgcccctcaggaaggttctggctgtggtggggactgcggaggccagcagtgaacaccccttgggcgtggcagtc

SEQ ID NO: 5202 - RNA, 178 nt, synthetic construct
  misc_feature 1..178: note = Description of Artificial Sequence: Synthetic polynucleotide
  source 1..178: mol_type = other RNA
ttggtgactgccacgcccaagttttagagctagaaatagcaagttaaaataaggctagtccgttatcaacttgaaaaagtggcaccgagtcggtgcatgtggccacactgcccctcaggaaggttctggctgtggtggggactgcggaggccagcagtgaacaccccttgggcgtggc

SEQ ID NO: 5203 - RNA, 180 nt, synthetic construct
  misc_feature 1..180: note = Description of Artificial Sequence: Synthetic polynucleotide
  source 1..180: mol_type = other RNA
ttggtgactgccacgcccaagttttagagctagaaatagcaagttaaaataaggctagtccgttatcaacttgaaaaagtggcaccgagtcggtgcgtggccacactgcccctcaggaaggttctggctgtggtggggactgcggaggccagcagtgaacaccccttgggcgtggcagtc

SEQ ID NO: 5204 - RNA, 180 nt, synthetic construct
  misc_feature 1..180: note = Description of Artificial Sequence: Synthetic polynucleotide
  source 1..180: mol_type = other RNA
ttggtgactgccacgcccaagttttagagctagaaatagcaagttaaaataaggctagtccgttatcaacttgaaaaagtggcaccgagtcggtgcggatgtggccacactgcccctcaggaaggttctggctgtggtggggactgcggaggccagcagtgaacaccccttgggcgtggc

SEQ ID NO: 5205 - RNA, 182 nt, synthetic construct
  misc_feature 1..182: note = Description of Artificial Sequence: Synthetic polynucleotide
  source 1..182: mol_type = other RNA
ttggtgactgccacgcccaagttttagagctagaaatagcaagttaaaataaggctagtccgttatcaacttgaaaaagtggcaccgagtcggtgcatgtggccacactgcccctcaggaaggttctggctgtggtggggactgcggaggccagcagtgaacaccccttgggcgtggcagtc

SEQ ID NO: 5206 - RNA, 20 nt, synthetic construct
  misc_feature 1..20: note = Description of Artificial Sequence: Synthetic oligonucleotide
  source 1..20: mol_type = other RNA
gaaggttctggctgtggtgg

SEQ ID NO: 5207-5209 - skipped (3 entries)

SEQ ID NO: 5210 - RNA, 10 nt, synthetic construct
  misc_feature 1..10: note = Description of Artificial Sequence: Synthetic oligonucleotide
  source 1..10: mol_type = other RNA
ccacagccag

SEQ ID NO: 5211 - RNA, 11 nt, synthetic construct
  misc_feature 1..11: note = Description of Artificial Sequence: Synthetic oligonucleotide
  source 1..11: mol_type = other RNA
ccacagccaga

SEQ ID NO: 5212 - RNA, 12 nt, synthetic construct
  misc_feature 1..12: note = Description of Artificial Sequence: Synthetic oligonucleotide
  source 1..12: mol_type = other RNA
ccacagccagaa

SEQ ID NO: 5213 - RNA, 13 nt, synthetic construct
  misc_feature 1..13: note = Description of Artificial Sequence: Synthetic oligonucleotide
  source 1..13: mol_type = other RNA
ccacagccagaac

SEQ ID NO: 5214 - RNA, 14 nt, synthetic construct
  misc_feature 1..14: note = Description of Artificial Sequence: Synthetic oligonucleotide
  source 1..14: mol_type = other RNA
ccacagccagaacc

SEQ ID NO: 5215 - RNA, 15 nt, synthetic construct
  misc_feature 1..15: note = Description of Artificial Sequence: Synthetic oligonucleotide
  source 1..15: mol_type = other RNA
ccacagccagaacct

SEQ ID NO: 5216 - RNA, 16 nt, synthetic construct
  misc_feature 1..16: note = Description of Artificial Sequence: Synthetic oligonucleotide
  source 1..16: mol_type = other RNA
ccacagccagaacctt

SEQ ID NO: 5217 - RNA, 17 nt, synthetic construct
  misc_feature 1..17: note = Description of Artificial Sequence: Synthetic oligonucleotide
  source 1..17: mol_type = other RNA
ccacagccagaaccttc

SEQ ID NO: 5218 - RNA, 30 nt, synthetic construct
  misc_feature 1..30: note = Description of Artificial Sequence: Synthetic oligonucleotide
  source 1..30: mol_type = other RNA
ggtgttcactgctggcctccgcagtcccca

SEQ ID NO: 5219 - RNA, 20 nt, synthetic construct
  misc_feature 1..20: note = Description of Artificial Sequence: Synthetic oligonucleotide
  source 1..20: mol_type = other RNA
aaagactgtgatgtttgaca

SEQ ID NO: 5220 - RNA, 20 nt, synthetic construct
  misc_feature 1..20: note = Description of Artificial Sequence: Synthetic oligonucleotide
  source 1..20: mol_type = other RNA
cagataaagactgtgatgtt

SEQ ID NO: 5221 - RNA, 20 nt, synthetic construct
  misc_feature 1..20: note = Description of Artificial Sequence: Synthetic oligonucleotide
  source 1..20: mol_type = other RNA
tggttgtttttggcagataa

SEQ ID NO: 5222 - RNA, 20 nt, synthetic construct
  misc_feature 1..20: note = Description of Artificial Sequence: Synthetic oligonucleotide
  source 1..20: mol_type = other RNA
gagttgtggttgtttttggc

SEQ ID NO: 5223 - RNA, 20 nt, synthetic construct
  misc_feature 1..20: note = Description of Artificial Sequence: Synthetic oligonucleotide
  source 1..20: mol_type = other RNA
caaaaacaaccacaactcac

SEQ ID NO: 5224 - RNA, 20 nt, synthetic construct
  misc_feature 1..20: note = Description of Artificial Sequence: Synthetic oligonucleotide
  source 1..20: mol_type = other RNA
caactcactgaccacaatac

SEQ ID NO: 5225 - RNA, 20 nt, synthetic construct
  misc_feature 1..20: note = Description of Artificial Sequence: Synthetic oligonucleotide
  source 1..20: mol_type = other RNA
tcactgaccacaatacagat

SEQ ID NO: 5226 - RNA, 20 nt, synthetic construct
  misc_feature 1..20: note = Description of Artificial Sequence: Synthetic oligonucleotide
  source 1..20: mol_type = other RNA
tttttggcagataaagactg

SEQ ID NO: 5227 - RNA, 20 nt, synthetic construct
  misc_feature 1..20: note = Description of Artificial Sequence: Synthetic oligonucleotide
  source 1..20: mol_type = other RNA
tccatctgtattgtggtcag

SEQ ID NO: 5228 - RNA, 20 nt, synthetic construct
  misc_feature 1..20: note = Description of Artificial Sequence: Synthetic oligonucleotide
  source 1..20: mol_type = other RNA
ctggctgtggtggggactgc

SEQ ID NO: 5229-5231 - skipped (3 entries)

SEQ ID NO: 5232 - RNA, 10 nt, synthetic construct
  misc_feature 1..10: note = Description of Artificial Sequence: Synthetic oligonucleotide
  source 1..10: mol_type = other RNA
gtccccacca

SEQ ID NO: 5233 - RNA, 11 nt, synthetic construct
  misc_feature 1..11: note = Description of Artificial Sequence: Synthetic oligonucleotide
  source 1..11: mol_type = other RNA
gtccccaccac

SEQ ID NO: 5234 - RNA, 12 nt, synthetic construct
  misc_feature 1..12: note = Description of Artificial Sequence: Synthetic oligonucleotide
  source 1..12: mol_type = other RNA
gtccccaccaca

SEQ ID NO: 5235 - RNA, 13 nt, synthetic construct
  misc_feature 1..13: note = Description of Artificial Sequence: Synthetic oligonucleotide
  source 1..13: mol_type = other RNA
gtccccaccacag

SEQ ID NO: 5236 - RNA, 14 nt, synthetic construct
  misc_feature 1..14: note = Description of Artificial Sequence: Synthetic oligonucleotide
  source 1..14: mol_type = other RNA
gtccccaccacagc

SEQ ID NO: 5237 - RNA, 15 nt, synthetic construct
  misc_feature 1..15: note = Description of Artificial Sequence: Synthetic oligonucleotide
  source 1..15: mol_type = other RNA
gtccccaccacagcc

SEQ ID NO: 5238 - RNA, 16 nt, synthetic construct
  misc_feature 1..16: note = Description of Artificial Sequence: Synthetic oligonucleotide
  source 1..16: mol_type = other RNA
gtccccaccacagcca

SEQ ID NO: 5239 - RNA, 17 nt, synthetic construct
  misc_feature 1..17: note = Description of Artificial Sequence: Synthetic oligonucleotide
  source 1..17: mol_type = other RNA
gtccccaccacagccag

SEQ ID NO: 5240 - RNA, 23 nt, synthetic construct
  misc_feature 1..23: note = Description of Artificial Sequence: Synthetic oligonucleotide
  source 1..23: mol_type = other RNA
ggtgttcactgctggcctccgca

SEQ ID NO: 5241 - RNA, 24 nt, synthetic construct
  misc_feature 1..24: note = Description of Artificial Sequence: Synthetic oligonucleotide
  source 1..24: mol_type = other RNA
gggtgttcactgctggcctccgca

SEQ ID NO: 5242 - RNA, 25 nt, synthetic construct
  misc_feature 1..25: note = Description of Artificial Sequence: Synthetic oligonucleotide
  source 1..25: mol_type = other RNA
ggggtgttcactgctggcctccgca

SEQ ID NO: 5243 - RNA, 26 nt, synthetic construct
  misc_feature 1..26: note = Description of Artificial Sequence: Synthetic oligonucleotide
  source 1..26: mol_type = other RNA
aggggtgttcactgctggcctccgca

SEQ ID NO: 5244 - RNA, 27 nt, synthetic construct
  misc_feature 1..27: note = Description of Artificial Sequence: Synthetic oligonucleotide
  source 1..27: mol_type = other RNA
aaggggtgttcactgctggcctccgca

SEQ ID NO: 5245 - RNA, 28 nt, synthetic construct
  misc_feature 1..28: note = Description of Artificial Sequence: Synthetic oligonucleotide
  source 1..28: mol_type = other RNA
caaggggtgttcactgctggcctccgca

SEQ ID NO: 5246 - RNA, 29 nt, synthetic construct
  misc_feature 1..29: note = Description of Artificial Sequence: Synthetic oligonucleotide
  source 1..29: mol_type = other RNA
ccaaggggtgttcactgctggcctccgca

SEQ ID NO: 5247 - RNA, 30 nt, synthetic construct
  misc_feature 1..30: note = Description of Artificial Sequence: Synthetic oligonucleotide
  source 1..30: mol_type = other RNA
cccaaggggtgttcactgctggcctccgca

SEQ ID NO: 5248 - RNA, 20 nt, synthetic construct
  misc_feature 1..20: note = Description of Artificial Sequence: Synthetic oligonucleotide
  source 1..20: mol_type = other RNA
gggactgcggaggccagcag

SEQ ID NO: 5249-5251 - skipped (3 entries)

SEQ ID NO: 5252 - RNA, 10 nt, synthetic construct
  misc_feature 1..10: note = Description of Artificial Sequence: Synthetic oligonucleotide
  source 1..10: mol_type = other RNA
ctggcctccg

SEQ ID NO: 5253 - RNA, 11 nt, synthetic construct
  misc_feature 1..11: note = Description of Artificial Sequence: Synthetic oligonucleotide
  source 1..11: mol_type = other RNA
ctggcctccgc

SEQ ID NO: 5254 - RNA, 12 nt, synthetic construct
  misc_feature 1..12: note = Description of Artificial Sequence: Synthetic oligonucleotide
  source 1..12: mol_type = other RNA
ctggcctccgca

SEQ ID NO: 5255 - RNA, 13 nt, synthetic construct
  misc_feature 1..13: note = Description of Artificial Sequence: Synthetic oligonucleotide
  source 1..13: mol_type = other RNA
ctggcctccgcag

SEQ ID NO: 5256 - RNA, 14 nt, synthetic construct
  misc_feature 1..14: note = Description of Artificial Sequence: Synthetic oligonucleotide
  source 1..14: mol_type = other RNA
ctggcctccgcagt

SEQ ID NO: 5257 - RNA, 15 nt, synthetic construct
  misc_feature 1..15: note = Description of Artificial Sequence: Synthetic oligonucleotide
  source 1..15: mol_type = other RNA
ctggcctccgcagtc

SEQ ID NO: 5258 - RNA, 16 nt, synthetic construct
  misc_feature 1..16: note = Description of Artificial Sequence: Synthetic oligonucleotide
  source 1..16: mol_type = other RNA
ctggcctccgcagtcc

SEQ ID NO: 5259 - RNA, 17 nt, synthetic construct
  misc_feature 1..17: note = Description of Artificial Sequence: Synthetic oligonucleotide
  source 1..17: mol_type = other RNA
ctggcctccgcagtccc

SEQ ID NO: 5260 - RNA, 11 nt, synthetic construct
  misc_feature 1..11: note = Description of Artificial Sequence: Synthetic oligonucleotide
  source 1..11: mol_type = other RNA
ggtgttcactg

SEQ ID NO: 5261 - RNA, 12 nt, synthetic construct
  misc_feature 1..12: note = Description of Artificial Sequence: Synthetic oligonucleotide
  source 1..12: mol_type = other RNA
gggtgttcactg

SEQ ID NO: 5262 - RNA, 13 nt, synthetic construct
  misc_feature 1..13: note = Description of Artificial Sequence: Synthetic oligonucleotide
  source 1..13: mol_type = other RNA
ggggtgttcactg

SEQ ID NO: 5263 - RNA, 14 nt, synthetic construct
  misc_feature 1..14: note = Description of Artificial Sequence: Synthetic oligonucleotide
  source 1..14: mol_type = other RNA
aggggtgttcactg

SEQ ID NO: 5264 - RNA, 15 nt, synthetic construct
  misc_feature 1..15: note = Description of Artificial Sequence: Synthetic oligonucleotide
  source 1..15: mol_type = other RNA
aaggggtgttcactg

SEQ ID NO: 5265 - RNA, 16 nt, synthetic construct
  misc_feature 1..16: note = Description of Artificial Sequence: Synthetic oligonucleotide
  source 1..16: mol_type = other RNA
caaggggtgttcactg

SEQ ID NO: 5266 - RNA, 17 nt, synthetic construct
  misc_feature 1..17: note = Description of Artificial Sequence: Synthetic oligonucleotide
  source 1..17: mol_type = other RNA
ccaaggggtgttcactg

SEQ ID NO: 5267 - RNA, 18 nt, synthetic construct
  misc_feature 1..18: note = Description of Artificial Sequence: Synthetic oligonucleotide
  source 1..18: mol_type = other RNA
cccaaggggtgttcactg

SEQ ID NO: 5268 - RNA, 19 nt, synthetic construct
  misc_feature 1..19: note = Description of Artificial Sequence: Synthetic oligonucleotide
  source 1..19: mol_type = other RNA
gcccaaggggtgttcactg

SEQ ID NO: 5269 - RNA, 20 nt, synthetic construct
  misc_feature 1..20: note = Description of Artificial Sequence: Synthetic oligonucleotide
  source 1..20: mol_type = other RNA
cgcccaaggggtgttcactg

SEQ ID NO: 5270 - RNA, 21 nt, synthetic construct
  misc_feature 1..21: note = Description of Artificial Sequence: Synthetic oligonucleotide
  source 1..21: mol_type = other RNA
acgcccaaggggtgttcactg

SEQ ID NO: 5271 - RNA, 22 nt, synthetic construct
  misc_feature 1..22: note = Description of Artificial Sequence: Synthetic oligonucleotide
  source 1..22: mol_type = other RNA
cacgcccaaggggtgttcactg

SEQ ID NO: 5272 - RNA, 23 nt, synthetic construct
  misc_feature 1..23: note = Description of Artificial Sequence: Synthetic oligonucleotide
  source 1..23: mol_type = other RNA
ccacgcccaaggggtgttcactg

SEQ ID NO: 5273 - RNA, 24 nt, synthetic construct
  misc_feature 1..24: note = Description of Artificial Sequence: Synthetic oligonucleotide
  source 1..24: mol_type = other RNA
gccacgcccaaggggtgttcactg

SEQ ID NO: 5274 - RNA, 25 nt, synthetic construct
  misc_feature 1..25: note = Description of Artificial Sequence: Synthetic oligonucleotide
  source 1..25: mol_type = other RNA
tgccacgcccaaggggtgttcactg

SEQ ID NO: 5275 - RNA, 26 nt, synthetic construct
  misc_feature 1..26: note = Description of Artificial Sequence: Synthetic oligonucleotide
  source 1..26: mol_type = other RNA
ctgccacgcccaaggggtgttcactg

SEQ ID NO: 5276 - RNA, 27 nt, synthetic construct
  misc_feature 1..27: note = Description of Artificial Sequence: Synthetic oligonucleotide
  source 1..27: mol_type = other RNA
actgccacgcccaaggggtgttcactg

SEQ ID NO: 5277 - RNA, 28 nt, synthetic construct
  misc_feature 1..28: note = Description of Artificial Sequence: Synthetic oligonucleotide
  source 1..28: mol_type = other RNA
gactgccacgcccaaggggtgttcactg

SEQ ID NO: 5278 - RNA, 29 nt, synthetic construct
  misc_feature 1..29: note = Description of Artificial Sequence: Synthetic oligonucleotide
  source 1..29: mol_type = other RNA
tgactgccacgcccaaggggtgttcactg

SEQ ID NO: 5279 - RNA, 30 nt, synthetic construct
  misc_feature 1..30: note = Description of Artificial Sequence: Synthetic oligonucleotide
  source 1..30: mol_type = other RNA
gtgactgccacgcccaaggggtgttcactg

SEQ ID NO: 5280 - RNA, 20 nt, synthetic construct
  misc_feature 1..20: note = Description of Artificial Sequence: Synthetic oligonucleotide
  source 1..20: mol_type = other RNA
gacatggtgaggaataaaag

SEQ ID NO: 5281 - RNA, 20 nt, synthetic construct
  misc_feature 1..20: note = Description of Artificial Sequence: Synthetic oligonucleotide
  source 1..20: mol_type = other RNA
aggacatggtgaggaataaa

SEQ ID NO: 5282 - RNA, 20 nt, synthetic construct
  misc_feature 1..20: note = Description of Artificial Sequence: Synthetic oligonucleotide
  source 1..20: mol_type = other RNA
tggctgtggtggggactgcg

SEQ ID NO: 5283-5285 - skipped (3 entries)

SEQ ID NO: 5286 - RNA, 10 nt, synthetic construct
  misc_feature 1..10: note = Description of Artificial Sequence: Synthetic oligonucleotide
  source 1..10: mol_type = other RNA
agtccccacc

SEQ ID NO: 5287 - RNA, 11 nt, synthetic construct
  misc_feature 1..11: note = Description of Artificial Sequence: Synthetic oligonucleotide
  source 1..11: mol_type = other RNA
agtccccacca

SEQ ID NO: 5288 - RNA, 12 nt, synthetic construct
  misc_feature 1..12: note = Description of Artificial Sequence: Synthetic oligonucleotide
  source 1..12: mol_type = other RNA
agtccccaccac

SEQ ID NO: 5289 - RNA, 13 nt, synthetic construct
  misc_feature 1..13: note = Description of Artificial Sequence: Synthetic oligonucleotide
  source 1..13: mol_type = other RNA
agtccccaccaca

SEQ ID NO: 5290 - RNA, 14 nt, synthetic construct
  misc_feature 1..14: note = Description of Artificial Sequence: Synthetic oligonucleotide
  source 1..14: mol_type = other RNA
agtccccaccacag

SEQ ID NO: 5291 - RNA, 15 nt, synthetic construct
  misc_feature 1..15: note = Description of Artificial Sequence: Synthetic oligonucleotide
  source 1..15: mol_type = other RNA
agtccccaccacagc

SEQ ID NO: 5292 - RNA, 16 nt, synthetic construct
  misc_feature 1..16: note = Description of Artificial Sequence: Synthetic oligonucleotide
  source 1..16: mol_type = other RNA
agtccccaccacagcc

SEQ ID NO: 5293 - RNA, 17 nt, synthetic construct
  misc_feature 1..17: note = Description of Artificial Sequence: Synthetic oligonucleotide
  source 1..17: mol_type = other RNA
agtccccaccacagcca

SEQ ID NO: 5294 - RNA, 22 nt, synthetic construct
  misc_feature 1..22: note = Description of Artificial Sequence: Synthetic oligonucleotide
  source 1..22: mol_type = other RNA
ggtgttcactgctggcctccgc

SEQ ID NO: 5295 - RNA, 23 nt, synthetic construct
  misc_feature 1..23: note = Description of Artificial Sequence: Synthetic oligonucleotide
  source 1..23: mol_type = other RNA
gggtgttcactgctggcctccgc

SEQ ID NO: 5296 - RNA, 24 nt, synthetic construct
  misc_feature 1..24: note = Description of Artificial Sequence: Synthetic oligonucleotide
  source 1..24: mol_type = other RNA
ggggtgttcactgctggcctccgc

SEQ ID NO: 5297 - RNA, 25 nt, synthetic construct
  misc_feature 1..25: note = Description of Artificial Sequence: Synthetic oligonucleotide
  source 1..25: mol_type = other RNA
aggggtgttcactgctggcctccgc

SEQ ID NO: 5298 - RNA, 26 nt, synthetic construct
  misc_feature 1..26: note = Description of Artificial Sequence: Synthetic oligonucleotide
  source 1..26: mol_type = other RNA
aaggggtgttcactgctggcctccgc

SEQ ID NO: 5299 - RNA, 27 nt, synthetic construct
  misc_feature 1..27: note = Description of Artificial Sequence: Synthetic oligonucleotide
  source 1..27: mol_type = other RNA
caaggggtgttcactgctggcctccgc

SEQ ID NO: 5300 - RNA, 28 nt, synthetic construct
  misc_feature 1..28: note = Description of Artificial Sequence: Synthetic oligonucleotide
  source 1..28: mol_type = other RNA
ccaaggggtgttcactgctggcctccgc

SEQ ID NO: 5301 - RNA, 29 nt, synthetic construct
  misc_feature 1..29: note = Description of Artificial Sequence: Synthetic oligonucleotide
  source 1..29: mol_type = other RNA
cccaaggggtgttcactgctggcctccgc

SEQ ID NO: 5302 - RNA, 30 nt, synthetic construct
  misc_feature 1..30: note = Description of Artificial Sequence: Synthetic oligonucleotide
  source 1..30: mol_type = other RNA
gcccaaggggtgttcactgctggcctccgc

SEQ ID NO: 5303 - RNA, 20 nt, synthetic construct
  misc_feature 1..20: note = Description of Artificial Sequence: Synthetic oligonucleotide
  source 1..20: mol_type = other RNA
gtggccacatcccccagcag

SEQ ID NO: 5304 - RNA, 20 nt, synthetic construct
  misc_feature 1..20: note = Description of Artificial Sequence: Synthetic oligonucleotide
  source 1..20: mol_type = other RNA
tggtgaggaataaaagagca

SEQ ID NO: 5305 - RNA, 20 nt, synthetic construct
  misc_feature 1..20: note = Description of Artificial Sequence: Synthetic oligonucleotide
  source 1..20: mol_type = other RNA
gggagggcagggccacgccc

SEQ ID NO: 5306 - RNA, 20 nt, synthetic construct
  misc_feature 1..20: note = Description of Artificial Sequence: Synthetic oligonucleotide
  source 1..20: mol_type = other RNA
tgaggaataaaagagcattg

SEQ ID NO: 5307 - RNA, 20 nt, synthetic construct
  misc_feature 1..20: note = Description of Artificial Sequence: Synthetic oligonucleotide
  source 1..20: mol_type = other RNA
ggcagtgtggccacatcccc

SEQ ID NO: 5308 - RNA, 20 nt, synthetic construct
  misc_feature 1..20: note = Description of Artificial Sequence: Synthetic oligonucleotide
  source 1..20: mol_type = other RNA
gccagaaccttcctgagggg

SEQ ID NO: 5309 - RNA, 20 nt, synthetic construct
  misc_feature 1..20: note = Description of Artificial Sequence: Synthetic oligonucleotide
  source 1..20: mol_type = other RNA
tccgcagtccccaccacagc

SEQ ID NO: 5310 - RNA, 20 nt, synthetic construct
  misc_feature 1..20: note = Description of Artificial Sequence: Synthetic oligonucleotide
  source 1..20: mol_type = other RNA
gtgttcactgctggcctccg

SEQ ID NO: 5311 - RNA, 20 nt, synthetic construct
  misc_feature 1..20: note = Description of Artificial Sequence: Synthetic oligonucleotide
  source 1..20: mol_type = other RNA
ggcctccgcagtccccacca

SEQ ID NO: 5312 - RNA, 20 nt, synthetic construct
  misc_feature 1..20: note = Description of Artificial Sequence: Synthetic oligonucleotide
  source 1..20: mol_type = other RNA
caagtccacgtacctcttta

SEQ ID NO: 5313 - RNA, 20 nt, synthetic construct
  misc_feature 1..20: note = Description of Artificial Sequence: Synthetic oligonucleotide
  source 1..20: mol_type = other RNA
gtggtggggactgcggaggc

SEQ ID NO: 5314-5316 - skipped (3 entries)

SEQ ID NO: 5317 - RNA, 10 nt, synthetic construct
  misc_feature 1..10: note = Description of Artificial Sequence: Synthetic oligonucleotide
  source 1..10: mol_type = other RNA
tccgcagtcc

SEQ ID NO: 5318 - RNA, 11 nt, synthetic construct
  misc_feature 1..11: note = Description of Artificial Sequence: Synthetic oligonucleotide
  source 1..11: mol_type = other RNA
tccgcagtccc

SEQ ID NO: 5319 - RNA, 12 nt, synthetic construct
  misc_feature 1..12: note = Description of Artificial Sequence: Synthetic oligonucleotide
  source 1..12: mol_type = other RNA
tccgcagtcccc

SEQ ID NO: 5320 - RNA, 13 nt, synthetic construct
  misc_feature 1..13: note = Description of Artificial Sequence: Synthetic oligonucleotide
  source 1..13: mol_type = other RNA
tccgcagtcccca

SEQ ID NO: 5321 - RNA, 14 nt, synthetic construct
  misc_feature 1..14: note = Description of Artificial Sequence: Synthetic oligonucleotide
  source 1..14: mol_type = other RNA
tccgcagtccccac

SEQ ID NO: 5322 - RNA, 15 nt, synthetic construct
  misc_feature 1..15: note = Description of Artificial Sequence: Synthetic oligonucleotide
  source 1..15: mol_type = other RNA
tccgcagtccccacc

SEQ ID NO: 5323 - RNA, 16 nt, synthetic construct
  misc_feature 1..16: note = Description of Artificial Sequence: Synthetic oligonucleotide
  source 1..16: mol_type = other RNA
tccgcagtccccacca

SEQ ID NO: 5324 - RNA, 17 nt, synthetic construct
  misc_feature 1..17: note = Description of Artificial Sequence: Synthetic oligonucleotide
  source 1..17: mol_type = other RNA
tccgcagtccccaccac

SEQ ID NO: 5325 - RNA, 17 nt, synthetic construct
  misc_feature 1..17: note = Description of Artificial Sequence: Synthetic oligonucleotide
  source 1..17: mol_type = other RNA
ggtgttcactgctggcc

SEQ ID NO: 5326 - RNA, 18 nt, synthetic construct
  misc_feature 1..18: note = Description of Artificial Sequence: Synthetic oligonucleotide
  source 1..18: mol_type = other RNA
gggtgttcactgctggcc

SEQ ID NO: 5327 - RNA, 19 nt, synthetic construct
  misc_feature 1..19: note = Description of Artificial Sequence: Synthetic oligonucleotide
  source 1..19: mol_type = other RNA
ggggtgttcactgctggcc

SEQ ID NO: 5328 - RNA, 20 nt, synthetic construct
  misc_feature 1..20: note = Description of Artificial Sequence: Synthetic oligonucleotide
  source 1..20: mol_type = other RNA
aggggtgttcactgctggcc

SEQ ID NO: 5329 - RNA, 21 nt, synthetic construct
  misc_feature 1..21: note = Description of Artificial Sequence: Synthetic oligonucleotide
  source 1..21: mol_type = other RNA
aaggggtgttcactgctggcc

SEQ ID NO: 5330 - RNA, 22 nt, synthetic construct
  misc_feature 1..22: note = Description of Artificial Sequence: Synthetic oligonucleotide
  source 1..22: mol_type = other RNA
caaggggtgttcactgctggcc

SEQ ID NO: 5331 - RNA, 23 nt, synthetic construct
  misc_feature 1..23: note = Description of Artificial Sequence: Synthetic oligonucleotide
  source 1..23: mol_type = other RNA
ccaaggggtgttcactgctggcc

SEQ ID NO: 5332 - RNA, 24 nt, synthetic construct
  misc_feature 1..24: note = Description of Artificial Sequence: Synthetic oligonucleotide
  source 1..24: mol_type = other RNA
cccaaggggtgttcactgctggcc

SEQ ID NO: 5333 - RNA, 25 nt, synthetic construct
  misc_feature 1..25: note = Description of Artificial Sequence: Synthetic oligonucleotide
  source 1..25: mol_type = other RNA
gcccaaggggtgttcactgctggcc

SEQ ID NO: 5334 - RNA, 26 nt, synthetic construct
  misc_feature 1..26: note = Description of Artificial Sequence: Synthetic oligonucleotide
  source 1..26: mol_type = other RNA
cgcccaaggggtgttcactgctggcc

SEQ ID NO: 5335 - RNA, 27 nt, synthetic construct
  misc_feature 1..27: note = Description of Artificial Sequence: Synthetic oligonucleotide
  source 1..27: mol_type = other RNA
acgcccaaggggtgttcactgctggcc

SEQ ID NO: 5336 - RNA, 28 nt, synthetic construct
  misc_feature 1..28: note = Description of Artificial Sequence: Synthetic oligonucleotide
  source 1..28: mol_type = other RNA
cacgcccaaggggtgttcactgctggcc

SEQ ID NO: 5337 - RNA, 29 nt, synthetic construct
  misc_feature 1..29: note = Description of Artificial Sequence: Synthetic oligonucleotide
  source 1..29: mol_type = other RNA
ccacgcccaaggggtgttcactgctggcc

SEQ ID NO: 5338 - RNA, 30 nt, synthetic construct
  misc_feature 1..30: note = Description of Artificial Sequence: Synthetic oligonucleotide
  source 1..30: mol_type = other RNA
gccacgcccaaggggtgttcactgctggcc

SEQ ID NO: 5339 - RNA, 20 nt, synthetic construct
  misc_feature 1..20: note = Description of Artificial Sequence: Synthetic oligonucleotide
  source 1..20: mol_type = other RNA
ggacatggtgaggaataaaa

SEQ ID NO: 5340 - RNA, 20 nt, synthetic construct
  misc_feature 1..20: note = Description of Artificial Sequence: Synthetic oligonucleotide
  source 1..20: mol_type = other RNA
gtggggactgcggaggccag

SEQ ID NO: 5341-5343 - skipped (3 entries)

SEQ ID NO: 5344 - RNA, 10 nt, synthetic construct
  misc_feature 1..10: note = Description of Artificial Sequence: Synthetic oligonucleotide
  source 1..10: mol_type = other RNA
gcctccgcag

SEQ ID NO: 5345 - RNA, 11 nt, synthetic construct
  misc_feature 1..11: note = Description of Artificial Sequence: Synthetic oligonucleotide
  source 1..11: mol_type = other RNA
gcctccgcagt

SEQ ID NO: 5346 - RNA, 12 nt, synthetic construct
  misc_feature 1..12: note = Description of Artificial Sequence: Synthetic oligonucleotide
  source 1..12: mol_type = other RNA
gcctccgcagtc

SEQ ID NO: 5347 - RNA, 13 nt, synthetic construct
  misc_feature 1..13: note = Description of Artificial Sequence: Synthetic oligonucleotide
  source 1..13: mol_type = other RNA
gcctccgcagtcc

SEQ ID NO: 5348 - RNA, 14 nt, synthetic construct
  misc_feature 1..14: note = Description of Artificial Sequence: Synthetic oligonucleotide
  source 1..14: mol_type = other RNA
gcctccgcagtccc

SEQ ID NO: 5349 - RNA, 15 nt, synthetic construct
  misc_feature 1..15: note = Description of Artificial Sequence: Synthetic oligonucleotide
  source 1..15: mol_type = other RNA
gcctccgcagtcccc

SEQ ID NO: 5350 - RNA, 16 nt, synthetic construct
  misc_feature 1..16: note = Description of Artificial Sequence: Synthetic oligonucleotide
  source 1..16: mol_type = other RNA
gcctccgcagtcccca

SEQ ID NO: 5351 - RNA, 17 nt, synthetic construct
  misc_feature 1..17: note = Description of Artificial Sequence: Synthetic oligonucleotide
  source 1..17: mol_type = other RNA
gcctccgcagtccccac

SEQ ID NO: 5352 - RNA, 14 nt, synthetic construct
  misc_feature 1..14: note = Description of Artificial Sequence: Synthetic oligonucleotide
  source 1..14: mol_type = other RNA
ggtgttcactgctg

SEQ ID NO: 5353 - RNA, 15 nt, synthetic construct
  misc_feature 1..15: note = Description of Artificial Sequence: Synthetic oligonucleotide
  source 1..15: mol_type = other RNA
gggtgttcactgctg

SEQ ID NO: 5354 - RNA, 16 nt, synthetic construct
  misc_feature 1..16: note = Description of Artificial Sequence: Synthetic oligonucleotide
  source 1..16: mol_type = other RNA
ggggtgttcactgctg

SEQ ID NO: 5355 - RNA, 17 nt, synthetic construct
  misc_feature 1..17: note = Description of Artificial Sequence: Synthetic oligonucleotide
  source 1..17: mol_type = other RNA
aggggtgttcactgctg

SEQ ID NO: 5356 - RNA, 18 nt, synthetic construct
  misc_feature 1..18: note = Description of Artificial Sequence: Synthetic oligonucleotide
  source 1..18: mol_type = other RNA
aaggggtgttcactgctg

SEQ ID NO: 5357 - RNA, 19 nt, synthetic construct
  misc_feature 1..19: note = Description of Artificial Sequence: Synthetic oligonucleotide
  source 1..19: mol_type = other RNA
caaggggtgttcactgctg

SEQ ID NO: 5358 - RNA, 20 nt, synthetic construct
  misc_feature 1..20: note = Description of Artificial Sequence: Synthetic oligonucleotide
  source 1..20: mol_type = other RNA
ccaaggggtgttcactgctg

SEQ ID NO: 5359 - RNA, 21 nt, synthetic construct
  misc_feature 1..21: note = Description of Artificial Sequence: Synthetic oligonucleotide
  source 1..21: mol_type = other RNA
cccaaggggtgttcactgctg

SEQ ID NO: 5360 - RNA, 22 nt, synthetic construct
  misc_feature 1..22: note = Description of Artificial Sequence: Synthetic oligonucleotide
  source 1..22: mol_type = other RNA
gcccaaggggtgttcactgctg

SEQ ID NO: 5361 - RNA, 23 nt, synthetic construct
  misc_feature 1..23: note = Description of Artificial Sequence: Synthetic oligonucleotide
  source 1..23: mol_type = other RNA
cgcccaaggggtgttcactgctg

SEQ ID NO: 5362 - RNA, 24 nt, synthetic construct
  misc_feature 1..24: note = Description of Artificial Sequence: Synthetic oligonucleotide
  source 1..24: mol_type = other RNA
acgcccaaggggtgttcactgctg

SEQ ID NO: 5363 - RNA, 25 nt, synthetic construct
  misc_feature 1..25: note = Description of Artificial Sequence: Synthetic oligonucleotide
  source 1..25: mol_type = other RNA
cacgcccaaggggtgttcactgctg

SEQ ID NO: 5364 - RNA, 26 nt, synthetic construct
  misc_feature 1..26: note = Description of Artificial Sequence: Synthetic oligonucleotide
  source 1..26: mol_type = other RNA
ccacgcccaaggggtgttcactgctg

SEQ ID NO: 5365 - RNA, 27 nt, synthetic construct
  misc_feature 1..27: note = Description of Artificial Sequence: Synthetic oligonucleotide
  source 1..27: mol_type = other RNA
gccacgcccaaggggtgttcactgctg

SEQ ID NO: 5366 - RNA, 28 nt, synthetic construct
  misc_feature 1..28: note = Description of Artificial Sequence: Synthetic oligonucleotide
  source 1..28: mol_type = other RNA
tgccacgcccaaggggtgttcactgctg

SEQ ID NO: 5367 - RNA, 29 nt, synthetic construct
  misc_feature 1..29: note = Description of Artificial Sequence: Synthetic oligonucleotide
  source 1..29: mol_type = other RNA
ctgccacgcccaaggggtgttcactgctg

SEQ ID NO: 5368 - RNA, 30 nt, synthetic construct
  misc_feature 1..30: note = Description of Artificial Sequence: Synthetic oligonucleotide
  source 1..30: mol_type = other RNA
actgccacgcccaaggggtgttcactgctg

SEQ ID NO: 5369 - RNA, 20 nt, synthetic construct
  misc_feature 1..20: note = Description of Artificial Sequence: Synthetic oligonucleotide
  source 1..20: mol_type = other RNA
atttggtgactgccacgccc

SEQ ID NO: 5370-5372 - skipped (3 entries)

SEQ ID NO: 5373 - RNA, 10 nt, synthetic construct
  misc_feature 1..10: note = Description of Artificial Sequence: Synthetic oligonucleotide
  source 1..10: mol_type = other RNA
cgtggcagtc

SEQ ID NO: 5374 - RNA, 11 nt, synthetic construct
  misc_feature 1..11: note = Description of Artificial Sequence: Synthetic oligonucleotide
  source 1..11: mol_type = other RNA
cgtggcagtca

SEQ ID NO: 5375 - RNA, 12 nt, synthetic construct
  misc_feature 1..12: note = Description of Artificial Sequence: Synthetic oligonucleotide
  source 1..12: mol_type = other RNA
cgtggcagtcac

SEQ ID NO: 5376 - RNA, 13 nt, synthetic construct
  misc_feature 1..13: note = Description of Artificial Sequence: Synthetic oligonucleotide
  source 1..13: mol_type = other RNA
cgtggcagtcacc

SEQ ID NO: 5377 - RNA, 14 nt, synthetic construct
  misc_feature 1..14: note = Description of Artificial Sequence: Synthetic oligonucleotide
  source 1..14: mol_type = other RNA
cgtggcagtcacca

SEQ ID NO: 5378 - RNA, 15 nt, synthetic construct
  misc_feature 1..15: note = Description of Artificial Sequence: Synthetic oligonucleotide
  source 1..15: mol_type = other RNA
cgtggcagtcaccaa

SEQ ID NO: 5379 - RNA, 16 nt, synthetic construct
  misc_feature 1..16: note = Description of Artificial Sequence: Synthetic oligonucleotide
  source 1..16: mol_type = other RNA
cgtggcagtcaccaaa

SEQ ID NO: 5380 - RNA, 17 nt, synthetic construct
  misc_feature 1..17: note = Description of Artificial Sequence: Synthetic oligonucleotide
  source 1..17: mol_type = other RNA
cgtggcagtcaccaaat

SEQ ID NO: 5381 - RNA, 10 nt, synthetic construct
  misc_feature 1..10: note = Description of Artificial Sequence: Synthetic oligonucleotide
  source 1..10: mol_type = other RNA
accccttggg

SEQ ID NO: 5382 - RNA, 11 nt, synthetic construct
  misc_feature 1..11: note = Description of Artificial Sequence: Synthetic oligonucleotide
  source 1..11: mol_type = other RNA
caccccttggg

SEQ ID NO: 5383 - RNA, 12 nt, synthetic construct
  misc_feature 1..12: note = Description of Artificial Sequence: Synthetic oligonucleotide
  source 1..12: mol_type = other RNA
acaccccttggg

SEQ ID NO: 5384 - RNA, 13 nt, synthetic construct
  misc_feature 1..13: note = Description of Artificial Sequence: Synthetic oligonucleotide
  source 1..13: mol_type = other RNA
aacaccccttggg

SEQ ID NO: 5385 - RNA, 14 nt, synthetic construct
  misc_feature 1..14: note = Description of Artificial Sequence: Synthetic oligonucleotide
  source 1..14: mol_type = other RNA
gaacaccccttggg

SEQ ID NO: 5386 - RNA, 15 nt, synthetic construct
  misc_feature 1..15: note = Description of Artificial Sequence: Synthetic oligonucleotide
  source 1..15: mol_type = other RNA
tgaacaccccttggg

SEQ ID NO: 5387 - RNA, 16 nt, synthetic construct
  misc_feature 1..16: note = Description of Artificial Sequence: Synthetic oligonucleotide
  source 1..16: mol_type = other RNA
gtgaacaccccttggg

SEQ ID NO: 5388 - RNA, 17 nt, synthetic construct
  misc_feature 1..17: note = Description of Artificial Sequence: Synthetic oligonucleotide
  source 1..17: mol_type = other RNA
agtgaacaccccttggg

SEQ ID NO: 5389 - RNA, 18 nt, synthetic construct
  misc_feature 1..18: note = Description of Artificial Sequence: Synthetic oligonucleotide
  source 1..18: mol_type = other RNA
cagtgaacaccccttggg

SEQ ID NO: 5390 - RNA, 19 nt, synthetic construct
  misc_feature 1..19: note = Description of Artificial Sequence: Synthetic oligonucleotide
  source 1..19: mol_type = other RNA
gcagtgaacaccccttggg

SEQ ID NO: 5391 - RNA, 20 nt, synthetic construct
  misc_feature 1..20: note = Description of Artificial Sequence: Synthetic oligonucleotide
  source 1..20: mol_type = other RNA
agcagtgaacaccccttggg

SEQ ID NO: 5392 - RNA, 21 nt, synthetic construct
  misc_feature 1..21: note = Description of Artificial Sequence: Synthetic oligonucleotide
  source 1..21: mol_type = other RNA
cagcagtgaacaccccttggg

SEQ ID NO: 5393 - RNA, 22 nt, synthetic construct
  misc_feature 1..22: note = Description of Artificial Sequence: Synthetic oligonucleotide
  source 1..22: mol_type = other RNA
ccagcagtgaacaccccttggg

SEQ ID NO: 5394 - RNA, 23 nt, synthetic construct
  misc_feature 1..23: note = Description of Artificial Sequence: Synthetic oligonucleotide
  source 1..23: mol_type = other RNA
gccagcagtgaacaccccttggg

SEQ ID NO: 5395 - RNA, 24 nt, synthetic construct
  misc_feature 1..24: note = Description of Artificial Sequence: Synthetic oligonucleotide
  source 1..24: mol_type = other RNA
ggccagcagtgaacaccccttggg

SEQ ID NO: 5396 - RNA, 25 nt, synthetic construct
  misc_feature 1..25: note = Description of Artificial Sequence: Synthetic oligonucleotide
  source 1..25: mol_type = other RNA
aggccagcagtgaacaccccttggg

SEQ ID NO: 5397 - RNA, 26 nt, synthetic construct
  misc_feature 1..26: note = Description of Artificial Sequence: Synthetic oligonucleotide
  source 1..26: mol_type = other RNA
gaggccagcagtgaacaccccttggg

SEQ ID NO: 5398 - RNA, 27 nt, synthetic construct
  misc_feature 1..27: note = Description of Artificial Sequence: Synthetic oligonucleotide
  source 1..27: mol_type = other RNA
ggaggccagcagtgaacaccccttggg

SEQ ID NO: 5399 - RNA, 28 nt, synthetic construct
  misc_feature 1..28: note = Description of Artificial Sequence: Synthetic oligonucleotide
  source 1..28: mol_type = other RNA
cggaggccagcagtgaacaccccttggg

SEQ ID NO: 5400 - RNA, 29 nt, synthetic construct
  misc_feature 1..29: note = Description of Artificial Sequence: Synthetic oligonucleotide
  source 1..29: mol_type = other RNA
gcggaggccagcagtgaacaccccttggg

SEQ ID NO: 5401 - RNA, 30 nt, synthetic construct
  misc_feature 1..30: note = Description of Artificial Sequence: Synthetic oligonucleotide
  source 1..30: mol_type = other RNA
tgcggaggccagcagtgaacaccccttggg

SEQ ID NO: 5402 - RNA, 20 nt, synthetic construct
  misc_feature 1..20: note = Description of Artificial Sequence: Synthetic oligonucleotide
  source 1..20: mol_type = other RNA
gtggtggggactgcggaggc

SEQ ID NO: 5403 - RNA, 20 nt, synthetic construct
  misc_feature 1..20: note = Description of Artificial Sequence: Synthetic oligonucleotide
  source 1..20: mol_type = other RNA
ggcagtcaccaaatactgta

SEQ ID NO: 5404 - RNA, 20 nt, synthetic construct
  misc_feature 1..20: note = Description of Artificial Sequence: Synthetic oligonucleotide
  source 1..20: mol_type = other RNA
gtggggactgcggaggccag

SEQ ID NO: 5405 - RNA, 20 nt, synthetic construct
  misc_feature 1..20: note = Description of Artificial Sequence: Synthetic oligonucleotide
  source 1..20: mol_type = other RNA
tgaacaccccttgggcgtgg

SEQ ID NO: 5406 - RNA, 20 nt, synthetic construct
  misc_feature 1..20: note = Description of Artificial Sequence: Synthetic oligonucleotide
  source 1..20: mol_type = other RNA
gttctggctgtggtggggac

SEQ ID NO: 5407-5409 - skipped (3 entries)

SEQ ID NO: 5410 - RNA, 10 nt, synthetic construct
  misc_feature 1..10: note = Description of Artificial Sequence: Synthetic oligonucleotide
  source 1..10: mol_type = other RNA
cccaccacag

SEQ ID NO: 5411 - RNA, 11 nt, synthetic construct
  misc_feature 1..11: note = Description of Artificial Sequence: Synthetic oligonucleotide
  source 1..11: mol_type = other RNA
cccaccacagc

SEQ ID NO: 5412 - RNA, 12 nt, synthetic construct
  misc_feature 1..12: note = Description of Artificial Sequence: Synthetic oligonucleotide
  source 1..12: mol_type = other RNA
cccaccacagcc

SEQ ID NO: 5413 - RNA, 13 nt, synthetic construct
  misc_feature 1..13: note = Description of Artificial Sequence: Synthetic oligonucleotide
  source 1..13: mol_type = other RNA
cccaccacagcca

SEQ ID NO: 5414 - RNA, 14 nt, synthetic construct
  misc_feature 1..14: note = Description of Artificial Sequence: Synthetic oligonucleotide
  source 1..14: mol_type = other RNA
cccaccacagccag

SEQ ID NO: 5415 - RNA, 15 nt, synthetic construct
  misc_feature 1..15: note = Description of Artificial Sequence: Synthetic oligonucleotide
  source 1..15: mol_type = other RNA
cccaccacagccaga

SEQ ID NO: 5416 - RNA, 16 nt, synthetic construct
  misc_feature 1..16: note = Description of Artificial Sequence: Synthetic oligonucleotide
  source 1..16: mol_type = other RNA
cccaccacagccagaa

SEQ ID NO: 5417 - RNA, 17 nt, synthetic construct
  misc_feature 1..17: note = Description of Artificial Sequence: Synthetic oligonucleotide
  source 1..17: mol_type = other RNA
cccaccacagccagaac

SEQ ID NO: 5418 - RNA, 26 nt, synthetic construct
  misc_feature 1..26: note = Description of Artificial Sequence: Synthetic oligonucleotide
  source 1..26: mol_type = other RNA
ggtgttcactgctggcctccgcagtc

SEQ ID NO: 5419 - RNA, 27 nt, synthetic construct
  misc_feature 1..27: note = Description of Artificial Sequence: Synthetic oligonucleotide
  source 1..27: mol_type = other RNA
gggtgttcactgctggcctccgcagtc

SEQ ID NO: 5420 - RNA, 28 nt, synthetic construct
  misc_feature 1..28: note = Description of Artificial Sequence: Synthetic oligonucleotide
  source 1..28: mol_type = other RNA
ggggtgttcactgctggcctccgcagtc

SEQ ID NO: 5421 - RNA, 29 nt, synthetic construct
  misc_feature 1..29: note = Description of Artificial Sequence: Synthetic oligonucleotide
  source 1..29: mol_type = other RNA
aggggtgttcactgctggcctccgcagtc

SEQ ID NO: 5422 - RNA, 30 nt, synthetic construct
  misc_feature 1..30: note = Description of Artificial Sequence: Synthetic oligonucleotide
  source 1..30: mol_type = other RNA
aaggggtgttcactgctggcctccgcagtc

SEQ ID NO: 5423 - RNA, 20 nt, synthetic construct
  misc_feature 1..20: note = Description of Artificial Sequence: Synthetic oligonucleotide
  source 1..20: mol_type = other RNA
gctgtggtggggactgcgga

SEQ ID NO: 5424-5426 - skipped (3 entries)

SEQ ID NO: 5427 - RNA, 10 nt, synthetic construct
  misc_feature 1..10: note = Description of Artificial Sequence: Synthetic oligonucleotide
  source 1..10: mol_type = other RNA
gcagtcccca

SEQ ID NO: 5428 - RNA, 11 nt, synthetic construct
  misc_feature 1..11: note = Description of Artificial Sequence: Synthetic oligonucleotide
  source 1..11: mol_type = other RNA
gcagtccccac

SEQ ID NO: 5429 - RNA, 12 nt, synthetic construct
  misc_feature 1..12: note = Description of Artificial Sequence: Synthetic oligonucleotide
  source 1..12: mol_type = other RNA
gcagtccccacc

SEQ ID NO: 5430 - RNA, 13 nt, synthetic construct
  misc_feature 1..13: note = Description of Artificial Sequence: Synthetic oligonucleotide
  source 1..13: mol_type = other RNA
gcagtccccacca

SEQ ID NO: 5431 - RNA, 14 nt, synthetic construct
  misc_feature 1..14: note = Description of Artificial Sequence: Synthetic oligonucleotide
  source 1..14: mol_type = other RNA
gcagtccccaccac

SEQ ID NO: 5432 - RNA, 15 nt, synthetic construct
  misc_feature 1..15: note = Description of Artificial Sequence: Synthetic oligonucleotide
  source 1..15: mol_type = other RNA
gcagtccccaccaca

SEQ ID NO: 5433 - RNA, 16 nt, synthetic construct
  misc_feature 1..16: note = Description of Artificial Sequence: Synthetic oligonucleotide
  source 1..16: mol_type = other RNA
gcagtccccaccacag

SEQ ID NO: 5434 - RNA, 17 nt, synthetic construct
  misc_feature 1..17: note = Description of Artificial Sequence: Synthetic oligonucleotide
  source 1..17: mol_type = other RNA
gcagtccccaccacagc

SEQ ID NO: 5435 - RNA, 20 nt, synthetic construct
  misc_feature 1..20: note = Description of Artificial Sequence: Synthetic oligonucleotide
  source 1..20: mol_type = other RNA
ggtgttcactgctggcctcc

SEQ ID NO: 5436 - RNA, 21 nt, synthetic construct
  misc_feature 1..21: note = Description of Artificial Sequence: Synthetic oligonucleotide
  source 1..21: mol_type = other RNA
gggtgttcactgctggcctcc

SEQ ID NO: 5437 - RNA, 22 nt, synthetic construct
  misc_feature 1..22: note = Description of Artificial Sequence: Synthetic oligonucleotide
  source 1..22: mol_type = other RNA
ggggtgttcactgctggcctcc

SEQ ID NO: 5438 - RNA, 23 nt, synthetic construct
  misc_feature 1..23: note = Description of Artificial Sequence: Synthetic oligonucleotide
  source 1..23: mol_type = other RNA
aggggtgttcactgctggcctcc

SEQ ID NO: 5439 - RNA, 24 nt, synthetic construct
  misc_feature 1..24: note = Description of Artificial Sequence: Synthetic oligonucleotide
  source 1..24: mol_type = other RNA
aaggggtgttcactgctggcctcc

SEQ ID NO: 5440 - RNA, 25 nt, synthetic construct
  misc_feature 1..25: note = Description of Artificial Sequence: Synthetic oligonucleotide
  source 1..25: mol_type = other RNA
caaggggtgttcactgctggcctcc

SEQ ID NO: 5441 - RNA, 26 nt, synthetic construct
  misc_feature 1..26: note = Description of Artificial Sequence: Synthetic oligonucleotide
  source 1..26: mol_type = other RNA
ccaaggggtgttcactgctggcctcc

SEQ ID NO: 5442 - RNA, 27 nt, synthetic construct
  misc_feature 1..27: note = Description of Artificial Sequence: Synthetic oligonucleotide
  source 1..27: mol_type = other RNA
cccaaggggtgttcactgctggcctcc

SEQ ID NO: 5443 - RNA, 28 nt, synthetic construct
  misc_feature 1..28: note = Description of Artificial Sequence: Synthetic oligonucleotide
  source 1..28: mol_type = other RNA
gcccaaggggtgttcactgctggcctcc

SEQ ID NO: 5444 - RNA, 29 nt, synthetic construct
  misc_feature 1..29: note = Description of Artificial Sequence: Synthetic oligonucleotide
  source 1..29: mol_type = other RNA
cgcccaaggggtgttcactgctggcctcc

SEQ ID NO: 5445 - RNA, 30 nt, synthetic construct
  misc_feature 1..30: note = Description of Artificial Sequence: Synthetic oligonucleotide
  source 1..30: mol_type = other RNA
acgcccaaggggtgttcactgctggcctcc

SEQ ID NO: 5446 - RNA, 20 nt, synthetic construct
  misc_feature 1..20: note = Description of Artificial Sequence: Synthetic oligonucleotide
  source 1..20: mol_type = other RNA
tggtggggactgcggaggcc

SEQ ID NO: 5447-5449 - skipped (3 entries)

SEQ ID NO: 5450 - RNA, 10 nt, synthetic construct
  misc_feature 1..10: note = Description of Artificial Sequence: Synthetic oligonucleotide
  source 1..10: mol_type = other RNA
ctccgcagtc

SEQ ID NO: 5451 - RNA, 11 nt, synthetic construct
  misc_feature 1..11: note = Description of Artificial Sequence: Synthetic oligonucleotide
  source 1..11: mol_type = other RNA
ctccgcagtcc

SEQ ID NO: 5452 - RNA, 12 nt, synthetic construct
  misc_feature 1..12: note = Description of Artificial Sequence: Synthetic oligonucleotide
  source 1..12: mol_type = other RNA
ctccgcagtccc

SEQ ID NO: 5453 - RNA, 13 nt, synthetic construct
  misc_feature 1..13: note = Description of Artificial Sequence: Synthetic oligonucleotide
  source 1..13: mol_type = other RNA
ctccgcagtcccc

SEQ ID NO: 5454 - RNA, 14 nt, synthetic construct
  misc_feature 1..14: note = Description of Artificial Sequence: Synthetic oligonucleotide
  source 1..14: mol_type = other RNA
ctccgcagtcccca

SEQ ID NO: 5455 - RNA, 15 nt, synthetic construct
  misc_feature 1..15: note = Description of Artificial Sequence: Synthetic oligonucleotide
  source 1..15: mol_type = other RNA
ctccgcagtccccac

SEQ ID NO: 5456 - RNA, 16 nt, synthetic construct
  misc_feature 1..16: note = Description of Artificial Sequence: Synthetic oligonucleotide
  source 1..16: mol_type = other RNA
ctccgcagtccccacc

SEQ ID NO: 5457 - RNA, 17 nt, synthetic construct
  misc_feature 1..17: note = Description of Artificial Sequence: Synthetic oligonucleotide
  source 1..17: mol_type = other RNA
ctccgcagtccccacca

SEQ ID NO: 5458 - RNA, 16 nt, synthetic construct
  misc_feature 1..16: note = Description of Artificial Sequence: Synthetic oligonucleotide
  source 1..16: mol_type = other RNA
ggtgttcactgctggc

SEQ ID NO: 5459 - RNA, 17 nt, synthetic construct
  misc_feature 1..17: note = Description of Artificial Sequence: Synthetic oligonucleotide
  source 1..17: mol_type = other RNA
gggtgttcactgctggc

SEQ ID NO: 5460 - RNA, 18 nt, synthetic construct
  misc_feature 1..18: note = Description of Artificial Sequence: Synthetic oligonucleotide
  source 1..18: mol_type = other RNA
ggggtgttcactgctggc

SEQ ID NO: 5461 - RNA, 19 nt, synthetic construct
  misc_feature 1..19: note = Description of Artificial Sequence: Synthetic oligonucleotide
  source 1..19: mol_type = other RNA
aggggtgttcactgctggc

SEQ ID NO: 5462 - RNA, 20 nt, synthetic construct
  misc_feature 1..20: note = Description of Artificial Sequence: Synthetic oligonucleotide
  source 1..20: mol_type = other RNA
aaggggtgttcactgctggc

SEQ ID NO: 5463 - RNA, 21 nt, synthetic construct
  misc_feature 1..21: note = Description of Artificial Sequence: Synthetic oligonucleotide
  source 1..21: mol_type = other RNA
caaggggtgttcactgctggc

SEQ ID NO: 5464 - RNA, 22 nt, synthetic construct
  misc_feature 1..22: note = Description of Artificial Sequence: Synthetic oligonucleotide
  source 1..22: mol_type = other RNA
ccaaggggtgttcactgctggc

SEQ ID NO: 5465 - RNA, 23 nt, synthetic construct
  misc_feature 1..23: note = Description of Artificial Sequence: Synthetic oligonucleotide
  source 1..23: mol_type = other RNA
cccaaggggtgttcactgctggc

SEQ ID NO: 5466 - RNA, 24 nt, synthetic construct
  misc_feature 1..24: note = Description of Artificial Sequence: Synthetic oligonucleotide
  source 1..24: mol_type = other RNA
gcccaaggggtgttcactgctggc

SEQ ID NO: 5467 - RNA, 25 nt, synthetic construct
  misc_feature 1..25: note = Description of Artificial Sequence: Synthetic oligonucleotide
  source 1..25: mol_type = other RNA
cgcccaaggggtgttcactgctggc

SEQ ID NO: 5468 - RNA, 26 nt, synthetic construct
  misc_feature 1..26: note = Description of Artificial Sequence: Synthetic oligonucleotide
  source 1..26: mol_type = other RNA
acgcccaaggggtgttcactgctggc

SEQ ID NO: 5469 - RNA, 27 nt, synthetic construct
  misc_feature 1..27: note = Description of Artificial Sequence: Synthetic oligonucleotide
  source 1..27: mol_type = other RNA
cacgcccaaggggtgttcactgctggc

SEQ ID NO: 5470 - RNA, 28 nt, synthetic construct
  misc_feature 1..28: note = Description of Artificial Sequence: Synthetic oligonucleotide
  source 1..28: mol_type = other RNA
ccacgcccaaggggtgttcactgctggc

SEQ ID NO: 5471 - RNA, 29 nt, synthetic construct
  misc_feature 1..29: note = Description of Artificial Sequence: Synthetic oligonucleotide
  source 1..29: mol_type = other RNA
gccacgcccaaggggtgttcactgctggc

SEQ ID NO: 5472 - RNA, 30 nt, synthetic construct
  misc_feature 1..30: note = Description of Artificial Sequence: Synthetic oligonucleotide
  source 1..30: mol_type = other RNA
tgccacgcccaaggggtgttcactgctggc

SEQ ID NO: 5473 - RNA, 20 nt, synthetic construct
  misc_feature 1..20: note = Description of Artificial Sequence: Synthetic oligonucleotide
  source 1..20: mol_type = other RNA
tggggactgcggaggccagc

SEQ ID NO: 5474-5476 - skipped (3 entries)

SEQ ID NO: 5477 - RNA, 10 nt, synthetic construct
  misc_feature 1..10: note = Description of Artificial Sequence: Synthetic oligonucleotide
  source 1..10: mol_type = other RNA
ggcctccgca

SEQ ID NO: 5478 - RNA, 11 nt, synthetic construct
  misc_feature 1..11: note = Description of Artificial Sequence: Synthetic oligonucleotide
  source 1..11: mol_type = other RNA
ggcctccgcag

SEQ ID NO: 5479 - RNA, 12 nt, synthetic construct
  misc_feature 1..12: note = Description of Artificial Sequence: Synthetic oligonucleotide
  source 1..12: mol_type = other RNA
ggcctccgcagt

SEQ ID NO: 5480 - RNA, 13 nt, synthetic construct
  misc_feature 1..13: note = Description of Artificial Sequence: Synthetic oligonucleotide
  source 1..13: mol_type = other RNA
ggcctccgcagtc

SEQ ID NO: 5481 - RNA, 14 nt, synthetic construct
  misc_feature 1..14: note = Description of Artificial Sequence: Synthetic oligonucleotide
  source 1..14: mol_type = other RNA
ggcctccgcagtcc

SEQ ID NO: 5482 - RNA, 15 nt, synthetic construct
  misc_feature 1..15: note = Description of Artificial Sequence: Synthetic oligonucleotide
  source 1..15: mol_type = other RNA
ggcctccgcagtccc

SEQ ID NO: 5483 - RNA, 16 nt, synthetic construct
  misc_feature 1..16: note = Description of Artificial Sequence: Synthetic oligonucleotide
  source 1..16: mol_type = other RNA
ggcctccgcagtcccc

SEQ ID NO: 5484 - RNA, 17 nt, synthetic construct
  misc_feature 1..17: note = Description of Artificial Sequence: Synthetic oligonucleotide
  source 1..17: mol_type = other RNA
ggcctccgcagtcccca

SEQ ID NO: 5485 - RNA, 13 nt, synthetic construct
  misc_feature 1..13: note = Description of Artificial Sequence: Synthetic oligonucleotide
  source 1..13: mol_type = other RNA
ggtgttcactgct

SEQ ID NO: 5486 - RNA, 14 nt, synthetic construct
  misc_feature 1..14: note = Description of Artificial Sequence: Synthetic oligonucleotide
  source 1..14: mol_type = other RNA
gggtgttcactgct

SEQ ID NO: 5487 - RNA, 15 nt, synthetic construct
  misc_feature 1..15: note = Description of Artificial Sequence: Synthetic oligonucleotide
  source 1..15: mol_type = other RNA
ggggtgttcactgct

SEQ ID NO: 5488 - RNA, 16 nt, synthetic construct
  misc_feature 1..16: note = Description of Artificial Sequence: Synthetic oligonucleotide
  source 1..16: mol_type = other RNA
aggggtgttcactgct

SEQ ID NO: 5489 - RNA, 17 nt, synthetic construct
  misc_feature 1..17: note = Description of Artificial Sequence: Synthetic oligonucleotide
  source 1..17: mol_type = other RNA
aaggggtgttcactgct

SEQ ID NO: 5490 - RNA, 18 nt, synthetic construct
  misc_feature 1..18: note = Description of Artificial Sequence: Synthetic oligonucleotide
  source 1..18: mol_type = other RNA
caaggggtgttcactgct

SEQ ID NO: 5491 - RNA, 19 nt, synthetic construct
  misc_feature 1..19: note = Description of Artificial Sequence: Synthetic oligonucleotide
  source 1..19: mol_type = other RNA
ccaaggggtgttcactgct

SEQ ID NO: 5492 - RNA, 20 nt, synthetic construct
  misc_feature 1..20: note = Description of Artificial Sequence: Synthetic oligonucleotide
  source 1..20: mol_type = other RNA
cccaaggggtgttcactgct

SEQ ID NO: 5493 - RNA, 21 nt, synthetic construct
  misc_feature 1..21: note = Description of Artificial Sequence: Synthetic oligonucleotide
  source 1..21: mol_type = other RNA
gcccaaggggtgttcactgct

SEQ ID NO: 5494 - RNA, 22 nt, synthetic construct
  misc_feature 1..22: note = Description of Artificial Sequence: Synthetic oligonucleotide
  source 1..22: mol_type = other RNA
cgcccaaggggtgttcactgct

SEQ ID NO: 5495 - RNA, 23 nt, synthetic construct
  misc_feature 1..23: note = Description of Artificial Sequence: Synthetic oligonucleotide
  source 1..23: mol_type = other RNA
acgcccaaggggtgttcactgct

SEQ ID NO: 5496 - RNA, 24 nt, synthetic construct
  misc_feature 1..24: note = Description of Artificial Sequence: Synthetic oligonucleotide
  source 1..24: mol_type = other RNA
cacgcccaaggggtgttcactgct

SEQ ID NO: 5497 - RNA, 25 nt, synthetic construct
  misc_feature 1..25: note = Description of Artificial Sequence: Synthetic oligonucleotide
  source 1..25: mol_type = other RNA
ccacgcccaaggggtgttcactgct

SEQ ID NO: 5498 - RNA, 26 nt, synthetic construct
  misc_feature 1..26: note = Description of Artificial Sequence: Synthetic oligonucleotide
  source 1..26: mol_type = other RNA
gccacgcccaaggggtgttcactgct

SEQ ID NO: 5499 - RNA, 27 nt, synthetic construct
  misc_feature 1..27: note = Description of Artificial Sequence: Synthetic oligonucleotide
  source 1..27: mol_type = other RNA
tgccacgcccaaggggtgttcactgct

SEQ ID NO: 5500 - RNA, 28 nt, synthetic construct
  misc_feature 1..28: note = Description of Artificial Sequence: Synthetic oligonucleotide
  source 1..28: mol_type = other RNA
ctgccacgcccaaggggtgttcactgct

SEQ ID NO: 5501 - RNA, 29 nt, synthetic construct
  misc_feature 1..29: note = Description of Artificial Sequence: Synthetic oligonucleotide
  source 1..29: mol_type = other RNA
actgccacgcccaaggggtgttcactgct

SEQ ID NO: 5502 - RNA, 30 nt, synthetic construct
  misc_feature 1..30: note = Description of Artificial Sequence: Synthetic oligonucleotide
  source 1..30: mol_type = other RNA
gactgccacgcccaaggggtgttcactgct

SEQ ID NO: 5503 - RNA, 20 nt, synthetic construct
  misc_feature 1..20: note = Description of Artificial Sequence: Synthetic oligonucleotide
  source 1..20: mol_type = other RNA
tgactgccacgcccaagggt

SEQ ID NO: 5504-5506 - skipped (3 entries)

SEQ ID NO: 5507 - RNA, 10 nt, synthetic construct
  misc_feature 1..10: note = Description of Artificial Sequence: Synthetic oligonucleotide
  source 1..10: mol_type = other RNA
cttgggcgtg

SEQ ID NO: 5508 - RNA, 11 nt, synthetic construct
  misc_feature 1..11: note = Description of Artificial Sequence: Synthetic oligonucleotide
  source 1..11: mol_type = other RNA
cttgggcgtgg

SEQ ID NO: 5509 - RNA, 12 nt, synthetic construct
  misc_feature 1..12: note = Description of Artificial Sequence: Synthetic oligonucleotide
  source 1..12: mol_type = other RNA
cttgggcgtggc

SEQ ID NO: 5510 - RNA, 13 nt, synthetic construct
  misc_feature 1..13: note = Description of Artificial Sequence: Synthetic oligonucleotide
  source 1..13: mol_type = other RNA
cttgggcgtggca

SEQ ID NO: 5511 - RNA, 14 nt, synthetic construct
  misc_feature 1..14: note = Description of Artificial Sequence: Synthetic oligonucleotide
  source 1..14: mol_type = other RNA
cttgggcgtggcag

SEQ ID NO: 5512 - RNA, 15 nt, synthetic construct
  misc_feature 1..15: note = Description of Artificial Sequence: Synthetic oligonucleotide
  source 1..15: mol_type = other RNA
cttgggcgtggcagt

SEQ ID NO: 5513 - RNA, 16 nt, synthetic construct
  misc_feature 1..16: note = Description of Artificial Sequence: Synthetic oligonucleotide
  source 1..16: mol_type = other RNA
cttgggcgtggcagtc

SEQ ID NO: 5514 - RNA, 17 nt, synthetic construct
  misc_feature 1..17: note = Description of Artificial Sequence: Synthetic oligonucleotide
  source 1..17: mol_type = other RNA
cttgggcgtggcagtca

SEQ ID NO: 5515 - RNA, 10 nt, synthetic construct
  misc_feature 1..10: note = Description of Artificial Sequence: Synthetic oligonucleotide
  source 1..10: mol_type = other RNA
gtgaacaccc

SEQ ID NO: 5516 - RNA, 11 nt, synthetic construct
  misc_feature 1..11: note = Description of Artificial Sequence: Synthetic oligonucleotide
  source 1..11: mol_type = other RNA
agtgaacaccc

SEQ ID NO: 5517 - RNA, 12 nt, synthetic construct
  misc_feature 1..12: note = Description of Artificial Sequence: Synthetic oligonucleotide
  source 1..12: mol_type = other RNA
cagtgaacaccc

SEQ ID NO: 5518 - RNA, 13 nt, synthetic construct
  misc_feature 1..13: note = Description of Artificial Sequence: Synthetic oligonucleotide
  source 1..13: mol_type = other RNA
gcagtgaacaccc

SEQ ID NO: 5519 - RNA, 14 nt, synthetic construct
  misc_feature 1..14: note = Description of Artificial Sequence: Synthetic oligonucleotide
  source 1..14: mol_type = other RNA
agcagtgaacaccc

SEQ ID NO: 5520 - RNA, 15 nt, synthetic construct
  misc_feature 1..15: note = Description of Artificial Sequence: Synthetic oligonucleotide
  source 1..15: mol_type = other RNA
cagcagtgaacaccc

SEQ ID NO: 5521 - RNA, 16 nt, synthetic construct
  misc_feature 1..16: note = Description of Artificial Sequence: Synthetic oligonucleotide
  source 1..16: mol_type = other RNA
ccagcagtgaacaccc

SEQ ID NO: 5522 - RNA, 17 nt, synthetic construct
  misc_feature 1..17: note = Description of Artificial Sequence: Synthetic oligonucleotide
  source 1..17: mol_type = other RNA
gccagcagtgaacaccc

SEQ ID NO: 5523 - RNA, 18 nt, synthetic construct
  misc_feature 1..18: note = Description of Artificial Sequence: Synthetic oligonucleotide
  source 1..18: mol_type = other RNA
ggccagcagtgaacaccc

SEQ ID NO: 5524 - RNA, 19 nt, synthetic construct
  misc_feature 1..19: note = Description of Artificial Sequence: Synthetic oligonucleotide
  source 1..19: mol_type = other RNA
aggccagcagtgaacaccc

SEQ ID NO: 5525 - RNA, 20 nt, synthetic construct
  misc_feature 1..20: note = Description of Artificial Sequence: Synthetic oligonucleotide
  source 1..20: mol_type = other RNA
gaggccagcagtgaacaccc

SEQ ID NO: 5526 - RNA, 21 nt, synthetic construct
  misc_feature 1..21: note = Description of Artificial Sequence: Synthetic oligonucleotide
  source 1..21: mol_type = other RNA
ggaggccagcagtgaacaccc

SEQ ID NO: 5527 - RNA, 22 nt, synthetic construct
  misc_feature 1..22: note = Description of Artificial Sequence: Synthetic oligonucleotide
  source 1..22: mol_type = other RNA
cggaggccagcagtgaacaccc

SEQ ID NO: 5528 - RNA, 23 nt, synthetic construct
  misc_feature 1..23: note = Description of Artificial Sequence: Synthetic oligonucleotide
  source 1..23: mol_type = other RNA
gcggaggccagcagtgaacaccc

SEQ ID NO: 5529 - RNA, 24 nt, synthetic construct
  misc_feature 1..24: note = Description of Artificial Sequence: Synthetic oligonucleotide
  source 1..24: mol_type = other RNA
tgcggaggccagcagtgaacaccc

SEQ ID NO: 5530 - RNA, 25 nt, synthetic construct
  misc_feature 1..25: note = Description of Artificial Sequence: Synthetic oligonucleotide
  source 1..25: mol_type = other RNA
ctgcggaggccagcagtgaacaccc

SEQ ID NO: 5531 - RNA, 26 nt, synthetic construct
  misc_feature 1..26: note = Description of Artificial Sequence: Synthetic oligonucleotide
  source 1..26: mol_type = other RNA
actgcggaggccagcagtgaacaccc

SEQ ID NO: 5532 - RNA, 27 nt, synthetic construct
  misc_feature 1..27: note = Description of Artificial Sequence: Synthetic oligonucleotide
  source 1..27: mol_type = other RNA
gactgcggaggccagcagtgaacaccc

SEQ ID NO: 5533 - RNA, 28 nt, synthetic construct
  misc_feature 1..28: note = Description of Artificial Sequence: Synthetic oligonucleotide
  source 1..28: mol_type = other RNA
ggactgcggaggccagcagtgaacaccc

SEQ ID NO: 5534 - RNA, 29 nt, synthetic construct
  misc_feature 1..29: note = Description of Artificial Sequence: Synthetic oligonucleotide
  source 1..29: mol_type = other RNA
gggactgcggaggccagcagtgaacaccc

SEQ ID NO: 5535 - RNA, 30 nt, synthetic construct
  misc_feature 1..30: note = Description of Artificial Sequence: Synthetic oligonucleotide
  source 1..30: mol_type = other RNA
ggggactgcggaggccagcagtgaacaccc

SEQ ID NO: 5536 - RNA, 20 nt, synthetic construct
  misc_feature 1..20: note = Description of Artificial Sequence: Synthetic oligonucleotide
  source 1..20: mol_type = other RNA
cattacccatggcgtcccca

SEQ ID NO: 5537 - RNA, 20 nt, synthetic construct
  misc_feature 1..20: note = Description of Artificial Sequence: Synthetic oligonucleotide
  source 1..20: mol_type = other RNA
ttctggctgtggtggggact

SEQ ID NO: 5538-5540 - skipped (3 entries)

SEQ ID NO: 5541 - RNA, 10 nt, synthetic construct
  misc_feature 1..10: note = Description of Artificial Sequence: Synthetic oligonucleotide
  source 1..10: mol_type = other RNA
ccccaccaca

SEQ ID NO: 5542 - RNA, 11 nt, synthetic construct
  misc_feature 1..11: note = Description of Artificial Sequence: Synthetic oligonucleotide
  source 1..11: mol_type = other RNA
ccccaccacag

SEQ ID NO: 5543 - RNA, 12 nt, synthetic construct
  misc_feature 1..12: note = Description of Artificial Sequence: Synthetic oligonucleotide
  source 1..12: mol_type = other RNA
ccccaccacagc

SEQ ID NO: 5544 - RNA, 13 nt, synthetic construct
  misc_feature 1..13: note = Description of Artificial Sequence: Synthetic oligonucleotide
  source 1..13: mol_type = other RNA
ccccaccacagcc

SEQ ID NO: 5545 - RNA, 14 nt, synthetic construct
  misc_feature 1..14: note = Description of Artificial Sequence: Synthetic oligonucleotide
  source 1..14: mol_type = other RNA
ccccaccacagcca

SEQ ID NO: 5546 - RNA, 15 nt, synthetic construct
  misc_feature 1..15: note = Description of Artificial Sequence: Synthetic oligonucleotide
  source 1..15: mol_type = other RNA
ccccaccacagccag

SEQ ID NO: 5547 - RNA, 16 nt, synthetic construct
  misc_feature 1..16: note = Description of Artificial Sequence: Synthetic oligonucleotide
  source 1..16: mol_type = other RNA
ccccaccacagccaga

SEQ ID NO: 5548 - RNA, 17 nt, synthetic construct
  misc_feature 1..17: note = Description of Artificial Sequence: Synthetic oligonucleotide
  source 1..17: mol_type = other RNA
ccccaccacagccagaa

SEQ ID NO: 5549 - RNA, 25 nt, synthetic construct
  misc_feature 1..25: note = Description of Artificial Sequence: Synthetic oligonucleotide
  source 1..25: mol_type = other RNA
ggtgttcactgctggcctccgcagt

SEQ ID NO: 5550 - RNA, 26 nt, synthetic construct
  misc_feature 1..26: note = Description of Artificial Sequence: Synthetic oligonucleotide
  source 1..26: mol_type = other RNA
gggtgttcactgctggcctccgcagt

SEQ ID NO: 5551 - RNA, 27 nt, synthetic construct
  misc_feature 1..27: note = Description of Artificial Sequence: Synthetic oligonucleotide
  source 1..27: mol_type = other RNA
ggggtgttcactgctggcctccgcagt

SEQ ID NO: 5552 - RNA, 28 nt, synthetic construct
  misc_feature 1..28: note = Description of Artificial Sequence: Synthetic oligonucleotide
  source 1..28: mol_type = other RNA
aggggtgttcactgctggcctccgcagt

SEQ ID NO: 5553 - RNA, 29 nt, synthetic construct
  misc_feature 1..29: note = Description of Artificial Sequence: Synthetic oligonucleotide
  source 1..29: mol_type = other RNA
aaggggtgttcactgctggcctccgcagt

SEQ ID NO: 5554 - RNA, 30 nt, synthetic construct
  misc_feature 1..30: note = Description of Artificial Sequence: Synthetic oligonucleotide
  source 1..30: mol_type = other RNA
caaggggtgttcactgctggcctccgcagt

SEQ ID NO: 5555 - RNA, 20 nt, synthetic construct
  misc_feature 1..20: note = Description of Artificial Sequence: Synthetic oligonucleotide
  source 1..20: mol_type = other RNA
actgcccctcaggaaggttc

SEQ ID NO: 5556-5558 - skipped (3 entries)

SEQ ID NO: 5559 - RNA, 10 nt, synthetic construct
  misc_feature 1..10: note = Description of Artificial Sequence: Synthetic oligonucleotide
  source 1..10: mol_type = other RNA
ccttcctgag

SEQ ID NO: 5560 - RNA, 11 nt, synthetic construct
  misc_feature 1..11: note = Description of Artificial Sequence: Synthetic oligonucleotide
  source 1..11: mol_type = other RNA
ccttcctgagg

SEQ ID NO: 5561 - RNA, 12 nt, synthetic construct
  misc_feature 1..12: note = Description of Artificial Sequence: Synthetic oligonucleotide
  source 1..12: mol_type = other RNA
ccttcctgaggg

SEQ ID NO: 5562 - RNA, 13 nt, synthetic construct
  misc_feature 1..13: note = Description of Artificial Sequence: Synthetic oligonucleotide
  source 1..13: mol_type = other RNA
ccttcctgagggg

SEQ ID NO: 5563 - RNA, 14 nt, synthetic construct
  misc_feature 1..14: note = Description of Artificial Sequence: Synthetic oligonucleotide
  source 1..14: mol_type = other RNA
ccttcctgaggggc

SEQ ID NO: 5564 - RNA, 15 nt, synthetic construct
  misc_feature 1..15: note = Description of Artificial Sequence: Synthetic oligonucleotide
  source 1..15: mol_type = other RNA
ccttcctgaggggca

SEQ ID NO: 5565 - RNA, 16 nt, synthetic construct
  misc_feature 1..16: note = Description of Artificial Sequence: Synthetic oligonucleotide
  source 1..16: mol_type = other RNA
ccttcctgaggggcag

SEQ ID NO: 5566 - RNA, 17 nt, synthetic construct
  misc_feature 1..17: note = Description of Artificial Sequence: Synthetic oligonucleotide
  source 1..17: mol_type = other RNA
ccttcctgaggggcagt

SEQ ID NO: 5567 - RNA, 30 nt, synthetic construct
  misc_feature 1..30: note = Description of Artificial Sequence: Synthetic oligonucleotide
  source 1..30: mol_type = other RNA
tggcctccgcagtccccaccacagccagaa

SEQ ID NO: 5568 - RNA, 32 nt, synthetic construct
  misc_feature 1..32: note = Description of Artificial Sequence: Synthetic oligonucleotide
  source 1..32: mol_type = other RNA
gctggcctccgcagtccccaccacagccagaa

SEQ ID NO: 5569 - RNA, 34 nt, synthetic construct
  misc_feature 1..34: note = Description of Artificial Sequence: Synthetic oligonucleotide
  source 1..34: mol_type = other RNA
ctgctggcctccgcagtccccaccacagccagaa

SEQ ID NO: 5570 - RNA, 36 nt, synthetic construct
  misc_feature 1..36: note = Description of Artificial Sequence: Synthetic oligonucleotide
  source 1..36: mol_type = other RNA
cactgctggcctccgcagtccccaccacagccagaa

SEQ ID NO: 5571 - RNA, 38 nt, synthetic construct
  misc_feature 1..38: note = Description of Artificial Sequence: Synthetic oligonucleotide
  source 1..38: mol_type = other RNA
ttcactgctggcctccgcagtccccaccacagccagaa

SEQ ID NO: 5572 - RNA, 40 nt, synthetic construct
  misc_feature 1..40: note = Description of Artificial Sequence: Synthetic oligonucleotide
  source 1..40: mol_type = other RNA
tgttcactgctggcctccgcagtccccaccacagccagaa

SEQ ID NO: 5573 - RNA, 42 nt, synthetic construct
  misc_feature 1..42: note = Description of Artificial Sequence: Synthetic oligonucleotide
  source 1..42: mol_type = other RNA
ggtgttcactgctggcctccgcagtccccaccacagccagaa

SEQ ID NO: 5574 - RNA, 44 nt, synthetic construct
  misc_feature 1..44: note = Description of Artificial Sequence: Synthetic oligonucleotide
  source 1..44: mol_type = other RNA
ggggtgttcactgctggcctccgcagtccccaccacagccagaa

SEQ ID NO: 5575 - RNA, 46 nt, synthetic construct
  misc_feature 1..46: note = Description of Artificial Sequence: Synthetic oligonucleotide
  source 1..46: mol_type = other RNA
aaggggtgttcactgctggcctccgcagtccccaccacagccagaa

SEQ ID NO: 5576 - RNA, 48 nt, synthetic construct
  misc_feature 1..48: note = Description of Artificial Sequence: Synthetic oligonucleotide
  source 1..48: mol_type = other RNA
ccaaggggtgttcactgctggcctccgcagtccccaccacagccagaa

SEQ ID NO: 5577 - RNA, 50 nt, synthetic construct
  misc_feature 1..50: note = Description of Artificial Sequence: Synthetic oligonucleotide
  source 1..50: mol_type = other RNA
gcccaaggggtgttcactgctggcctccgcagtccccaccacagccagaa

SEQ ID NO: 5578 - RNA, 52 nt, synthetic construct
  misc_feature 1..52: note = Description of Artificial Sequence: Synthetic oligonucleotide
  source 1..52: mol_type = other RNA
acgcccaaggggtgttcactgctggcctccgcagtccccaccacagccagaa

SEQ ID NO: 5579 - RNA, 54 nt, synthetic construct
  misc_feature 1..54: note = Description of Artificial Sequence: Synthetic oligonucleotide
  source 1..54: mol_type = other RNA
ccacgcccaaggggtgttcactgctggcctccgcagtccccaccacagccagaa

SEQ ID NO: 5580 - RNA, 56 nt, synthetic construct
  misc_feature 1..56: note = Description of Artificial Sequence: Synthetic oligonucleotide
  source 1..56: mol_type = other RNA
tgccacgcccaaggggtgttcactgctggcctccgcagtccccaccacagccagaa

SEQ ID NO: 5581 - RNA, 58 nt, synthetic construct
  misc_feature 1..58: note = Description of Artificial Sequence: Synthetic oligonucleotide
  source 1..58: mol_type = other RNA
actgccacgcccaaggggtgttcactgctggcctccgcagtccccaccacagccagaa

SEQ ID NO: 5582 - RNA, 60 nt, synthetic construct
  misc_feature 1..60: note = Description of Artificial Sequence: Synthetic oligonucleotide
  source 1..60: mol_type = other RNA
tgactgccacgcccaaggggtgttcactgctggcctccgcagtccccaccacagccagaa

SEQ ID NO: 5583 - RNA, 62 nt, synthetic construct
  misc_feature 1..62: note = Description of Artificial Sequence: Synthetic oligonucleotide
  source 1..62: mol_type = other RNA
ggtgactgccacgcccaaggggtgttcactgctggcctccgcagtccccaccacagccagaa

SEQ ID NO: 5584 - RNA, 64 nt, synthetic construct
  misc_feature 1..64: note = Description of Artificial Sequence: Synthetic oligonucleotide
  source 1..64: mol_type = other RNA
ttggtgactgccacgcccaaggggtgttcactgctggcctccgcagtccccaccacagccagaa

SEQ ID NO: 5585 - RNA, 66 nt, synthetic construct
  misc_feature 1..66: note = Description of Artificial Sequence: Synthetic oligonucleotide
  source 1..66: mol_type = other RNA
atttggtgactgccacgcccaaggggtgttcactgctggcctccgcagtccccaccacagccagaa

SEQ ID NO: 5586 - RNA, 68 nt, synthetic construct
  misc_feature 1..68: note = Description of Artificial Sequence: Synthetic oligonucleotide
  source 1..68: mol_type = other RNA
gtatttggtgactgccacgcccaaggggtgttcactgctggcctccgcagtccccaccacagccagaa

SEQ ID NO: 5587 - RNA, 70 nt, synthetic construct
  misc_feature 1..70: note = Description of Artificial Sequence: Synthetic oligonucleotide
  source 1..70: mol_type = other RNA
cagtatttggtgactgccacgcccaaggggtgttcactgctggcctccgcagtccccaccacagccagaa

SEQ ID NO: 5588 - RNA, 72 nt, synthetic construct
  misc_feature 1..72: note = Description of Artificial Sequence: Synthetic oligonucleotide
  source 1..72: mol_type = other RNA
tacagtatttggtgactgccacgcccaaggggtgttcactgctggcctccgcagtccccaccacagccagaa

SEQ ID NO: 5589 - RNA, 74 nt, synthetic construct
  misc_feature 1..74: note = Description of Artificial Sequence: Synthetic oligonucleotide
  source 1..74: mol_type = other RNA
tttacagtatttggtgactgccacgcccaaggggtgttcactgctggcctccgcagtccccaccacagccagaa

SEQ ID NO: 5590 - RNA, 76 nt, synthetic construct
  misc_feature 1..76: note = Description of Artificial Sequence: Synthetic oligonucleotide
  source 1..76: mol_type = other RNA
tctttacagtatttggtgactgccacgcccaaggggtgttcactgctggcctccgcagtccccaccacagccagaa

SEQ ID NO: 5591 - RNA, 134 nt, synthetic construct
  misc_feature 1..134: note = Description of Artificial Sequence: Synthetic polynucleotide
  source 1..134: mol_type = other RNA
actgcccctcaggaaggttcgttttagagctagaaatagcaagttaaaataaggctagtccgttatcaacttgaaaaagtggcaccgagtcggtgctggcctccgcagtccccaccacagccagaaccttcctg

SEQ ID NO: 5592 - RNA, 136 nt, synthetic construct
  misc_feature 1..136: note = Description of Artificial Sequence: Synthetic polynucleotide
  source 1..136: mol_type = other RNA
actgcccctcaggaaggttcgttttagagctagaaatagcaagttaaaataaggctagtccgttatcaacttgaaaaagtggcaccgagtcggtgcgctggcctccgcagtccccaccacagccagaaccttcctg

SEQ ID NO: 5593 - RNA, 138 nt, synthetic construct
  misc_feature 1..138: note = Description of Artificial Sequence: Synthetic polynucleotide
  source 1..138: mol_type = other RNA
actgcccctcaggaaggttcgttttagagctagaaatagcaagttaaaataaggctagtccgttatcaacttgaaaaagtggcaccgagtcggtgctggcctccgcagtccccaccacagccagaaccttcctgaggg

SEQ ID NO: 5594 - RNA, 138 nt, synthetic construct
  misc_feature 1..138: note = Description of Artificial Sequence: Synthetic polynucleotide
  source 1..138: mol_type = other RNA
actgcccctcaggaaggttcgttttagagctagaaatagcaagttaaaataaggctagtccgttatcaacttgaaaaagtggcaccgagtcggtgcctgctggcctccgcagtccccaccacagccagaaccttcctg

SEQ ID NO: 5595 - RNA, 140 nt, synthetic construct
  misc_feature 1..140: note = Description of Artificial Sequence: Synthetic polynucleotide
  source 1..140: mol_type = other RNA
actgcccctcaggaaggttcgttttagagctagaaatagcaagttaaaataaggctagtccgttatcaacttgaaaaagtggcaccgagtcggtgcgctggcctccgcagtccccaccacagccagaaccttcctgaggg

SEQ ID NO: 5596 - RNA, 140 nt, synthetic construct
  misc_feature 1..140: note = Description of Artificial Sequence: Synthetic polynucleotide
  source 1..140: mol_type = other RNA
actgcccctcaggaaggttcgttttagagctagaaatagcaagttaaaataaggctagtccgttatcaacttgaaaaagtggcaccgagtcggtgccactgctggcctccgcagtccccaccacagccagaaccttcctg

SEQ ID NO: 5597 - RNA, 142 nt, synthetic construct
  misc_feature 1..142: note = Description of Artificial Sequence: Synthetic polynucleotide
  source 1..142: mol_type = other RNA
actgcccctcaggaaggttcgttttagagctagaaatagcaagttaaaataaggctagtccgttatcaacttgaaaaagtggcaccgagtcggtgcttcactgctggcctccgcagtccccaccacagccagaaccttcctg

SEQ ID NO: 5598 - RNA, 142 nt, synthetic construct
  misc_feature 1..142: note = Description of Artificial Sequence: Synthetic polynucleotide
  source 1..142: mol_type = other RNA
actgcccctcaggaaggttcgttttagagctagaaatagcaagttaaaataaggctagtccgttatcaacttgaaaaagtggcaccgagtcggtgcctgctggcctccgcagtccccaccacagccagaaccttcctgaggg

SEQ ID NO: 5599 - RNA, 144 nt, synthetic construct
  misc_feature 1..144: note = Description of Artificial Sequence: Synthetic polynucleotide
  source 1..144: mol_type = other RNA
actgcccctcaggaaggttcgttttagagctagaaatagcaagttaaaataaggctagtccgttatcaacttgaaaaagtggcaccgagtcggtgccactgctggcctccgcagtccccaccacagccagaaccttcctgaggg

SEQ ID NO: 5600 - RNA, 144 nt, synthetic construct
  misc_feature 1..144: note = Description of Artificial Sequence: Synthetic polynucleotide
  source 1..144: mol_type = other RNA
actgcccctcaggaaggttcgttttagagctagaaatagcaagttaaaataaggctagtccgttatcaacttgaaaaagtggcaccgagtcggtgctgttcactgctggcctccgcagtccccaccacagccagaaccttcctg

SEQ ID NO: 5601 - RNA, 146 nt, synthetic construct
  misc_feature 1..146: note = Description of Artificial Sequence: Synthetic polynucleotide
  source 1..146: mol_type = other RNA
actgcccctcaggaaggttcgttttagagctagaaatagcaagttaaaataaggctagtccgttatcaacttgaaaaagtggcaccgagtcggtgcttcactgctggcctccgcagtccccaccacagccagaaccttcctgaggg

SEQ ID NO: 5602 - RNA, 146 nt, synthetic construct
  misc_feature 1..146: note = Description of Artificial Sequence: Synthetic polynucleotide
  source 1..146: mol_type = other RNA
actgcccctcaggaaggttcgttttagagctagaaatagcaagttaaaataaggctagtccgttatcaacttgaaaaagtggcaccgagtcggtgcggtgttcactgctggcctccgcagtccccaccacagccagaaccttcctg

SEQ ID NO: 5603 - RNA, 148 nt, synthetic construct
  misc_feature 1..148: note = Description of Artificial Sequence: Synthetic polynucleotide
  source 1..148: mol_type = other RNA
actgcccctcaggaaggttcgttttagagctagaaatagcaagttaaaataaggctagtccgttatcaacttgaaaaagtggcaccgagtcggtgcggggtgttcactgctggcctccgcagtccccaccacagccagaaccttcctg

SEQ ID NO: 5604 - RNA, 148 nt, synthetic construct
  misc_feature 1..148: note = Description of Artificial Sequence: Synthetic polynucleotide
  source 1..148: mol_type = other RNA
actgcccctcaggaaggttcgttttagagctagaaatagcaagttaaaataaggctagtccgttatcaacttgaaaaagtggcaccgagtcggtgctgttcactgctggcctccgcagtccccaccacagccagaaccttcctgaggg

SEQ ID NO: 5605 - RNA, 150 nt, synthetic construct
  misc_feature 1..150: note = Description of Artificial Sequence: Synthetic polynucleotide
  source 1..150: mol_type = other RNA
actgcccctcaggaaggttcgttttagagctagaaatagcaagttaaaataaggctagtccgttatcaacttgaaaaagtggcaccgagtcggtgcaaggggtgttcactgctggcctccgcagtccccaccacagccagaaccttcctg

SEQ ID NO: 5606 - RNA, 150 nt, synthetic construct
  misc_feature 1..150: note = Description of Artificial Sequence: Synthetic polynucleotide
  source 1..150: mol_type = other RNA
actgcccctcaggaaggttcgttttagagctagaaatagcaagttaaaataaggctagtccgttatcaacttgaaaaagtggcaccgagtcggtgcggtgttcactgctggcctccgcagtccccaccacagccagaaccttcctgaggg

SEQ ID NO: 5607 - RNA, 152 nt, synthetic construct
  misc_feature 1..152: note = Description of Artificial Sequence: Synthetic polynucleotide
  source 1..152: mol_type = other RNA
actgcccctcaggaaggttcgttttagagctagaaatagcaagttaaaataaggctagtccgttatcaacttgaaaaagtggcaccgagtcggtgcccaaggggtgttcactgctggcctccgcagtccccaccacagccagaaccttcctg

SEQ ID NO: 5608 - RNA, 152 nt, synthetic construct
  misc_feature 1..152: note = Description of Artificial Sequence: Synthetic polynucleotide
  source 1..152: mol_type = other RNA
actgcccctcaggaaggttcgttttagagctagaaatagcaagttaaaataaggctagtccgttatcaacttgaaaaagtggcaccgagtcggtgcggggtgttcactgctggcctccgcagtccccaccacagccagaaccttcctgaggg

SEQ ID NO: 5609 - RNA, 154 nt, synthetic construct
  misc_feature 1..154: note = Description of Artificial Sequence: Synthetic polynucleotide
  source 1..154: mol_type = other RNA
actgcccctcaggaaggttcgttttagagctagaaatagcaagttaaaataaggctagtccgttatcaacttgaaaaagtggcaccgagtcggtgcaaggggtgttcactgctggcctccgcagtccccaccacagccagaaccttcctgaggg

SEQ ID NO: 5610 - RNA, 154 nt, synthetic construct
  misc_feature 1..154: note = Description of Artificial Sequence: Synthetic polynucleotide
  source 1..154: mol_type = other RNA
actgcccctcaggaaggttcgttttagagctagaaatagcaagttaaaataaggctagtccgttatcaacttgaaaaagtggcaccgagtcggtgcgcccaaggggtgttcactgctggcctccgcagtccccaccacagccagaaccttcctg

SEQ ID NO: 5611 - RNA, 156 nt, synthetic construct
  misc_feature 1..156: note = Description of Artificial Sequence: Synthetic polynucleotide
  source 1..156: mol_type = other RNA
actgcccctcaggaaggttcgttttagagctagaaatagcaagttaaaataaggctagtccgttatcaacttgaaaaagtggcaccgagtcggtgcccaaggggtgttcactgctggcctccgcagtccccaccacagccagaaccttcctgaggg

SEQ ID NO: 5612 - RNA, 156 nt, synthetic construct
  misc_feature 1..156: note = Description of Artificial Sequence: Synthetic polynucleotide
  source 1..156: mol_type = other RNA
actgcccctcaggaaggttcgttttagagctagaaatagcaagttaaaataaggctagtccgttatcaacttgaaaaagtggcaccgagtcggtgcacgcccaaggggtgttcactgctggcctccgcagtccccaccacagccagaaccttcctg

SEQ ID NO: 5613 - RNA, 158 nt, synthetic construct
  misc_feature 1..158: note = Description of Artificial Sequence: Synthetic polynucleotide
  source 1..158: mol_type = other RNA
actgcccctcaggaaggttcgttttagagctagaaatagcaagttaaaataaggctagtccgttatcaacttgaaaaagtggcaccgagtcggtgcgcccaaggggtgttcactgctggcctccgcagtccccaccacagccagaaccttcctgaggg

SEQ ID NO: 5614 - RNA, 158 nt, synthetic construct
  misc_feature 1..158: note = Description of Artificial Sequence: Synthetic polynucleotide
  source 1..158: mol_type = other RNA
actgcccctcaggaaggttcgttttagagctagaaatagcaagttaaaataaggctagtccgttatcaacttgaaaaagtggcaccgagtcggtgcccacgcccaaggggtgttcactgctggcctccgcagtccccaccacagccagaaccttcctg

SEQ ID NO: 5615 - RNA, 160 nt, synthetic construct
  misc_feature 1..160: note = Description of Artificial Sequence: Synthetic polynucleotide
  source 1..160: mol_type = other RNA
actgcccctcaggaaggttcgttttagagctagaaatagcaagttaaaataaggctagtccgttatcaacttgaaaaagtggcaccgagtcggtgcacgcccaaggggtgttcactgctggcctccgcagtccccaccacagccagaaccttcctgaggg

SEQ ID NO: 5616 - RNA, 160 nt, synthetic construct
  misc_feature 1..160: note = Description of Artificial Sequence: Synthetic polynucleotide
  source 1..160: mol_type = other RNA
actgcccctcaggaaggttcgttttagagctagaaatagcaagttaaaataaggctagtccgttatcaacttgaaaaagtggcaccgagtcggtgctgccacgcccaaggggtgttcactgctggcctccgcagtccccaccacagccagaaccttcctg

SEQ ID NO: 5617 - RNA, 162 nt, synthetic construct
  misc_feature 1..162: note = Description of Artificial Sequence: Synthetic polynucleotide
  source 1..162: mol_type = other RNA
actgcccctcaggaaggttcgttttagagctagaaatagcaagttaaaataaggctagtccgttatcaacttgaaaaagtggcaccgagtcggtgcccacgcccaaggggtgttcactgctggcctccgcagtccccaccacagccagaaccttcctgaggg

SEQ ID NO: 5618 - RNA, 162 nt, synthetic construct
  misc_feature 1..162: note = Description of Artificial Sequence: Synthetic polynucleotide
  source 1..162: mol_type = other RNA
actgcccctcaggaaggttcgttttagagctagaaatagcaagttaaaataaggctagtccgttatcaacttgaaaaagtggcaccgagtcggtgcactgccacgcccaaggggtgttcactgctggcctccgcagtccccaccacagccagaaccttcctg

SEQ ID NO: 5619 - RNA, 164 nt, synthetic construct
  misc_feature 1..164: note = Description of Artificial Sequence: Synthetic polynucleotide
  source 1..164: mol_type = other RNA
actgcccctcaggaaggttcgttttagagctagaaatagcaagttaaaataaggctagtccgttatcaacttgaaaaagtggcaccgagtcggtgctgactgccacgcccaaggggtgttcactgctggcctccgcagtccccaccacagccagaaccttcctg

SEQ ID NO: 5620 - RNA, 164 nt, synthetic construct
  misc_feature 1..164: note = Description of Artificial Sequence: Synthetic polynucleotide
  source 1..164: mol_type = other RNA
actgcccctcaggaaggttcgttttagagctagaaatagcaagttaaaataaggctagtccgttatcaacttgaaaaagtggcaccgagtcggtgctgccacgcccaaggggtgttcactgctggcctccgcagtccccaccacagccagaaccttcctgaggg

SEQ ID NO: 5621 - RNA, 166 nt, synthetic construct
  misc_feature 1..166: note = Description of Artificial Sequence: Synthetic polynucleotide
  source 1..166: mol_type = other RNA
actgcccctcaggaaggttcgttttagagctagaaatagcaagttaaaataaggctagtccgttatcaacttgaaaaagtggcaccgagtcggtgcactgccacgcccaaggggtgttcactgctggcctccgcagtccccaccacagccagaaccttcctgaggg

SEQ ID NO: 5622 - RNA, 166 nt, synthetic construct
  misc_feature 1..166: note = Description of Artificial Sequence: Synthetic polynucleotide
  source 1..166: mol_type = other RNA
actgcccctcaggaaggttcgttttagagctagaaatagcaagttaaaataaggctagtccgttatcaacttgaaaaagtggcaccgagtcggtgcggtgactgccacgcccaaggggtgttcactgctggcctccgcagtccccaccacagccagaaccttcctg

SEQ ID NO: 5623 - RNA, 168 nt, synthetic construct
  misc_feature 1..168: note = Description of Artificial Sequence: Synthetic polynucleotide
  source 1..168: mol_type = other RNA
actgcccctcaggaaggttcgttttagagctagaaatagcaagttaaaataaggctagtccgttatcaacttgaaaaagtggcaccgagtcggtgcttggtgactgccacgcccaaggggtgttcactgctggcctccgcagtccccaccacagccagaaccttcctg

SEQ ID NO: 5624 - RNA, 168 nt, synthetic construct
  misc_feature 1..168: note = Description of Artificial Sequence: Synthetic polynucleotide
  source 1..168: mol_type = other RNA
actgcccctcaggaaggttcgttttagagctagaaatagcaagttaaaataaggctagtccgttatcaacttgaaaaagtggcaccgagtcggtgctgactgccacgcccaaggggtgttcactgctggcctccgcagtccccaccacagccagaaccttcctgaggg

SEQ ID NO: 5625 - RNA, 170 nt, synthetic construct
  misc_feature 1..170: note = Description of Artificial Sequence: Synthetic polynucleotide
  source 1..170: mol_type = other RNA
actgcccctcaggaaggttcgttttagagctagaaatagcaagttaaaataaggctagtccgttatcaacttgaaaaagtggcaccgagtcggtgcatttggtgactgccacgcccaaggggtgttcactgctggcctccgcagtccccaccacagccagaaccttcctg

SEQ ID NO: 5626 - RNA, 170 nt, synthetic construct
  misc_feature 1..170: note = Description of Artificial Sequence: Synthetic polynucleotide
  source 1..170: mol_type = other RNA
actgcccctcaggaaggttcgttttagagctagaaatagcaagttaaaataaggctagtccgttatcaacttgaaaaagtggcaccgagtcggtgcggtgactgccacgcccaaggggtgttcactgctggcctccgcagtccccaccacagccagaaccttcctgaggg

SEQ ID NO: 5627 - RNA, 172 nt, synthetic construct
  misc_feature 1..172: note = Description of Artificial Sequence: Synthetic polynucleotide
  source 1..172: mol_type = other RNA
actgcccctcaggaaggttcgttttagagctagaaatagcaagttaaaataaggctagtccgttatcaacttgaaaaagtggcaccgagtcggtgcgtatttggtgactgccacgcccaaggggtgttcactgctggcctccgcagtccccaccacagccagaaccttcctg

SEQ ID NO: 5628 - RNA, 172 nt, synthetic construct
  misc_feature 1..172: note = Description of Artificial Sequence: Synthetic polynucleotide
  source 1..172: mol_type = other RNA
actgcccctcaggaaggttcgttttagagctagaaatagcaagttaaaataaggctagtccgttatcaacttgaaaaagtggcaccgagtcggtgcttggtgactgccacgcccaaggggtgttcactgctggcctccgcagtccccaccacagccagaaccttcctgaggg

SEQ ID NO: 5629 - RNA, 174 nt, synthetic construct
  misc_feature 1..174: note = Description of Artificial Sequence: Synthetic polynucleotide
  source 1..174: mol_type = other RNA
actgcccctcaggaaggttcgttttagagctagaaatagcaagttaaaataaggctagtccgttatcaacttgaaaaagtggcaccgagtcggtgccagtatttggtgactgccacgcccaaggggtgttcactgctggcctccgcagtccccaccacagccagaaccttcctg

SEQ ID NO: 5630 - RNA, 174 nt, synthetic construct
  misc_feature 1..174: note = Description of Artificial Sequence: Synthetic polynucleotide
  source 1..174: mol_type = other RNA
actgcccctcaggaaggttcgttttagagctagaaatagcaagttaaaataaggctagtccgttatcaacttgaaaaagtggcaccgagtcggtgcatttggtgactgccacgcccaaggggtgttcactgctggcctccgcagtccccaccacagccagaaccttcctgaggg

SEQ ID NO: 5631 - RNA, 176 nt, synthetic construct
  misc_feature 1..176: note = Description of Artificial Sequence: Synthetic polynucleotide
  source 1..176: mol_type = other RNA
actgcccctcaggaaggttcgttttagagctagaaatagcaagttaaaataaggctagtccgttatcaacttgaaaaagtggcaccgagtcggtgctacagtatttggtgactgccacgcccaaggggtgttcactgctggcctccgcagtccccaccacagccagaaccttcctg

SEQ ID NO: 5632 - RNA, 176 nt, synthetic construct
  misc_feature 1..176: note = Description of Artificial Sequence: Synthetic polynucleotide
  source 1..176: mol_type = other RNA
actgcccctcaggaaggttcgttttagagctagaaatagcaagttaaaataaggctagtccgttatcaacttgaaaaagtggcaccgagtcggtgcgtatttggtgactgccacgcccaaggggtgttcactgctggcctccgcagtccccaccacagccagaaccttcctgaggg

SEQ ID NO: 5633 - RNA, 178 nt, synthetic construct
  misc_feature 1..178: note = Description of Artificial Sequence: Synthetic polynucleotide
  source 1..178: mol_type = other RNA
actgcccctcaggaaggttcgttttagagctagaaatagcaagttaaaataaggctagtccgttatcaacttgaaaaagtggcaccgagtcggtgccagtatttggtgactgccacgcccaaggggtgttcactgctggcctccgcagtccccaccacagccagaaccttcctgaggg

SEQ ID NO: 5634 - RNA, 178 nt, synthetic construct
  misc_feature 1..178: note = Description of Artificial Sequence: Synthetic polynucleotide
  source 1..178: mol_type = other RNA
actgcccctcaggaaggttcgttttagagctagaaatagcaagttaaaataaggctagtccgttatcaacttgaaaaagtggcaccgagtcggtgctttacagtatttggtgactgccacgcccaaggggtgttcactgctggcctccgcagtccccaccacagccagaaccttcctg

SEQ ID NO: 5635 - RNA, 180 nt, synthetic construct
  misc_feature 1..180: note = Description of Artificial Sequence: Synthetic polynucleotide
  source 1..180: mol_type = other RNA
actgcccctcaggaaggttcgttttagagctagaaatagcaagttaaaataaggctagtccgttatcaacttgaaaaagtggcaccgagtcggtgctacagtatttggtgactgccacgcccaaggggtgttcactgctggcctccgcagtccccaccacagccagaaccttcctgaggg

SEQ ID NO: 5636 - RNA, 180 nt, synthetic construct
  misc_feature 1..180: note = Description of Artificial Sequence: Synthetic polynucleotide
  source 1..180: mol_type = other RNA
actgcccctcaggaaggttcgttttagagctagaaatagcaagttaaaataaggctagtccgttatcaacttgaaaaagtggcaccgagtcggtgctctttacagtatttggtgactgccacgcccaaggggtgttcactgctggcctccgcagtccccaccacagccagaaccttcctg

SEQ ID NO: 5637 - RNA, 182 nt, synthetic construct
  misc_feature 1..182: note = Description of Artificial Sequence: Synthetic polynucleotide
  source 1..182: mol_type = other RNA
actgcccctcaggaaggttcgttttagagctagaaatagcaagttaaaataaggctagtccgttatcaacttgaaaaagtggcaccgagtcggtgctttacagtatttggtgactgccacgcccaaggggtgttcactgctggcctccgcagtccccaccacagccagaaccttcctgaggg

SEQ ID NO: 5638 - RNA, 20 nt, synthetic construct
  misc_feature 1..20: note = Description of Artificial Sequence: Synthetic oligonucleotide
  source 1..20: mol_type = other RNA
atgtggccacactgcccctc

SEQ ID NO: 5639-5641 - skipped (3 entries)

SEQ ID NO: 5642 - RNA, 10 nt, synthetic construct
  misc_feature 1..10: note = Description of Artificial Sequence: Synthetic oligonucleotide
  source 1..10: mol_type = other RNA
gggcagtgtg

SEQ ID NO: 5643 - RNA, 11 nt, synthetic construct
  misc_feature 1..11: note = Description of Artificial Sequence: Synthetic oligonucleotide
  source 1..11: mol_type = other RNA
gggcagtgtgg

SEQ ID NO: 5644 - RNA, 12 nt, synthetic construct
  misc_feature 1..12: note = Description of Artificial Sequence: Synthetic oligonucleotide
  source 1..12: mol_type = other RNA
gggcagtgtggc

SEQ ID NO: 5645 - RNA, 13 nt, synthetic construct
  misc_feature 1..13: note = Description of Artificial Sequence: Synthetic oligonucleotide
  source 1..13: mol_type = other RNA
gggcagtgtggcc

SEQ ID NO: 5646 - RNA, 14 nt, synthetic construct
  misc_feature 1..14: note = Description of Artificial Sequence: Synthetic oligonucleotide
  source 1..14: mol_type = other RNA
gggcagtgtggcca

SEQ ID NO: 5647 - RNA, 15 nt, synthetic construct
  misc_feature 1..15: note = Description of Artificial Sequence: Synthetic oligonucleotide
  source 1..15: mol_type = other RNA
gggcagtgtggccac

SEQ ID NO: 5648 - RNA, 16 nt, synthetic construct
  misc_feature 1..16: note = Description of Artificial Sequence: Synthetic oligonucleotide
  source 1..16: mol_type = other RNA
gggcagtgtggccaca

SEQ ID NO: 5649 - RNA, 17 nt, synthetic construct
  misc_feature 1..17: note = Description of Artificial Sequence: Synthetic oligonucleotide
  source 1..17: mol_type = other RNA
gggcagtgtggccacat

SEQ ID NO: 5650 - RNA, 40 nt, synthetic construct
  misc_feature 1..40: note = Description of Artificial Sequence: Synthetic oligonucleotide
  source 1..40: mol_type = other RNA
tggcctccgcagtccccaccacagccagaaccttcctgag

SEQ ID NO: 5651 - RNA, 42 nt, synthetic construct
  misc_feature 1..42: note = Description of Artificial Sequence: Synthetic oligonucleotide
  source 1..42: mol_type = other RNA
gctggcctccgcagtccccaccacagccagaaccttcctgag

SEQ ID NO: 5652 - RNA, 44 nt, synthetic construct
  misc_feature 1..44: note = Description of Artificial Sequence: Synthetic oligonucleotide
  source 1..44: mol_type = other RNA
ctgctggcctccgcagtccccaccacagccagaaccttcctgag

SEQ ID NO: 5653 - RNA, 46 nt, synthetic construct
  misc_feature 1..46: note = Description of Artificial Sequence: Synthetic oligonucleotide
  source 1..46: mol_type = other RNA
cactgctggcctccgcagtccccaccacagccagaaccttcctgag

SEQ ID NO: 5654 - RNA, 48 nt, synthetic construct
  misc_feature 1..48: note = Description of Artificial Sequence: Synthetic oligonucleotide
  source 1..48: mol_type = other RNA
ttcactgctggcctccgcagtccccaccacagccagaaccttcctgag

SEQ ID NO: 5655 - RNA, 50 nt, synthetic construct
  misc_feature 1..50: note = Description of Artificial Sequence: Synthetic oligonucleotide
  source 1..50: mol_type = other RNA
tgttcactgctggcctccgcagtccccaccacagccagaaccttcctgag

SEQ ID NO: 5656 - RNA, 52 nt, synthetic construct
  misc_feature 1..52: note = Description of Artificial Sequence: Synthetic oligonucleotide
  source 1..52: mol_type = other RNA
ggtgttcactgctggcctccgcagtccccaccacagccagaaccttcctgag

SEQ ID NO: 5657 - RNA, 54 nt, synthetic construct
  misc_feature 1..54: note = Description of Artificial Sequence: Synthetic oligonucleotide
  source 1..54: mol_type = other RNA
ggggtgttcactgctggcctccgcagtccccaccacagccagaaccttcctgag

SEQ ID NO: 5658 - RNA, 56 nt, synthetic construct
  misc_feature 1..56: note = Description of Artificial Sequence: Synthetic oligonucleotide
  source 1..56: mol_type = other RNA
aaggggtgttcactgctggcctccgcagtccccaccacagccagaaccttcctgag

SEQ ID NO: 5659 - RNA, 58 nt, synthetic construct
  misc_feature 1..58: note = Description of Artificial Sequence: Synthetic oligonucleotide
  source 1..58: mol_type = other RNA
ccaaggggtgttcactgctggcctccgcagtccccaccacagccagaaccttcctgag

SEQ ID NO: 5660 - RNA, 60 nt, synthetic construct
  misc_feature 1..60: note = Description of Artificial Sequence: Synthetic oligonucleotide
  source 1..60: mol_type = other RNA
gcccaaggggtgttcactgctggcctccgcagtccccaccacagccagaaccttcctgag

SEQ ID NO: 5661 - RNA, 62 nt, synthetic construct
  misc_feature 1..62: note = Description of Artificial Sequence: Synthetic oligonucleotide
  source 1..62: mol_type = other RNA
acgcccaaggggtgttcactgctggcctccgcagtccccaccacagccagaaccttcctgag

SEQ ID NO: 5662 - RNA, 64 nt, synthetic construct
  misc_feature 1..64: note = Description of Artificial Sequence: Synthetic oligonucleotide
  source 1..64: mol_type = other RNA
ccacgcccaaggggtgttcactgctggcctccgcagtccccaccacagccagaaccttcctgag

SEQ ID NO: 5663 - RNA, 66 nt, synthetic construct
  misc_feature 1..66: note = Description of Artificial Sequence: Synthetic oligonucleotide
  source 1..66: mol_type = other RNA
tgccacgcccaaggggtgttcactgctggcctccgcagtccccaccacagccagaaccttcctgag

SEQ ID NO: 5664 - RNA, 68 nt, synthetic construct
  misc_feature 1..68: note = Description of Artificial Sequence: Synthetic oligonucleotide
  source 1..68: mol_type = other RNA
actgccacgcccaaggggtgttcactgctggcctccgcagtccccaccacagccagaaccttcctgag

SEQ ID NO: 5665 - RNA, 70 nt, synthetic construct
  misc_feature 1..70: note = Description of Artificial Sequence: Synthetic oligonucleotide
  source 1..70: mol_type = other RNA
tgactgccacgcccaaggggtgttcactgctggcctccgcagtccccaccacagccagaaccttcctgag

SEQ ID NO: 5666 - RNA, 72 nt, synthetic construct
  misc_feature 1..72: note = Description of Artificial Sequence: Synthetic oligonucleotide
  source 1..72: mol_type = other RNA
ggtgactgccacgcccaaggggtgttcactgctggcctccgcagtccccaccacagccagaaccttcctgag

SEQ ID NO: 5667 - RNA, 74 nt, synthetic construct
  misc_feature 1..74: note = Description of Artificial Sequence: Synthetic oligonucleotide
  source 1..74: mol_type = other RNA
ttggtgactgccacgcccaaggggtgttcactgctggcctccgcagtccccaccacagccagaaccttcctgag

SEQ ID NO: 5668 - RNA, 76 nt, synthetic construct
  misc_feature 1..76: note = Description of Artificial Sequence: Synthetic oligonucleotide
  source 1..76: mol_type = other RNA
atttggtgactgccacgcccaaggggtgttcactgctggcctccgcagtccccaccacagccagaaccttcctgag

SEQ ID NO: 5669 - RNA, 144 nt, synthetic construct
  misc_feature 1..144: note = Description of Artificial Sequence: Synthetic polynucleotide
  source 1..144: mol_type = other RNA
atgtggccacactgcccctcgttttagagctagaaatagcaagttaaaataaggctagtccgttatcaacttgaaaaagtggcaccgagtcggtgctggcctccgcagtccccaccacagccagaaccttcctgaggggcagtg

SEQ ID NO: 5670 - RNA, 146 nt, synthetic construct
  misc_feature 1..146: note = Description of Artificial Sequence: Synthetic polynucleotide
  source 1..146: mol_type = other RNA
atgtggccacactgcccctcgttttagagctagaaatagcaagttaaaataaggctagtccgttatcaacttgaaaaagtggcaccgagtcggtgcgctggcctccgcagtccccaccacagccagaaccttcctgaggggcagtg

SEQ ID NO: 5671 - RNA, 148 nt, synthetic construct
  misc_feature 1..148: note = Description of Artificial Sequence: Synthetic polynucleotide
  source 1..148: mol_type = other RNA
atgtggccacactgcccctcgttttagagctagaaatagcaagttaaaataaggctagtccgttatcaacttgaaaaagtggcaccgagtcggtgctggcctccgcagtccccaccacagccagaaccttcctgaggggcagtgtggc

SEQ ID NO: 5672 - RNA, 148 nt, synthetic construct
  misc_feature 1..148: note = Description of Artificial Sequence: Synthetic polynucleotide
  source 1..148: mol_type = other RNA
atgtggccacactgcccctcgttttagagctagaaatagcaagttaaaataaggctagtccgttatcaacttgaaaaagtggcaccgagtcggtgcctgctggcctccgcagtccccaccacagccagaaccttcctgaggggcagtg

SEQ ID NO: 5673 - RNA, 150 nt, synthetic construct
  misc_feature 1..150: note = Description of Artificial Sequence: Synthetic polynucleotide
  source 1..150: mol_type = other RNA
atgtggccacactgcccctcgttttagagctagaaatagcaagttaaaataaggctagtccgttatcaacttgaaaaagtggcaccgagtcggtgcgctggcctccgcagtccccaccacagccagaaccttcctgaggggcagtgtggc

SEQ ID NO: 5674 - RNA, 150 nt, synthetic construct
  misc_feature 1..150: note = Description of Artificial Sequence: Synthetic polynucleotide
  source 1..150: mol_type = other RNA
atgtggccacactgcccctcgttttagagctagaaatagcaagttaaaataaggctagtccgttatcaacttgaaaaagtggcaccgagtcggtgccactgctggcctccgcagtccccaccacagccagaaccttcctgaggggcagtg

SEQ ID NO: 5675 - RNA, 152 nt, synthetic construct
  misc_feature 1..152: note = Description of Artificial Sequence: Synthetic polynucleotide
  source 1..152: mol_type = other RNA
atgtggccacactgcccctcgttttagagctagaaatagcaagttaaaataaggctagtccgttatcaacttgaaaaagtggcaccgagtcggtgcctgctggcctccgcagtccccaccacagccagaaccttcctgaggggcagtgtggc

SEQ ID NO: 5676 - RNA, 152 nt, synthetic construct
  misc_feature 1..152: note = Description of Artificial Sequence: Synthetic polynucleotide
  source 1..152: mol_type = other RNA
atgtggccacactgcccctcgttttagagctagaaatagcaagttaaaataaggctagtccgttatcaacttgaaaaagtggcaccgagtcggtgcttcactgctggcctccgcagtccccaccacagccagaaccttcctgaggggcagtg

SEQ ID NO: 5677 - RNA, 154 nt, synthetic construct
  misc_feature 1..154: note = Description of Artificial Sequence: Synthetic polynucleotide
  source 1..154: mol_type = other RNA
atgtggccacactgcccctcgttttagagctagaaatagcaagttaaaataaggctagtccgttatcaacttgaaaaagtggcaccgagtcggtgctgttcactgctggcctccgcagtccccaccacagccagaaccttcctgaggggcagtg

SEQ ID NO: 5678 - RNA, 154 nt, synthetic construct
  misc_feature 1..154: note = Description of Artificial Sequence: Synthetic polynucleotide
  source 1..154: mol_type = other RNA
atgtggccacactgcccctcgttttagagctagaaatagcaagttaaaataaggctagtccgttatcaacttgaaaaagtggcaccgagtcggtgccactgctggcctccgcagtccccaccacagccagaaccttcctgaggggcagtgtggc

SEQ ID NO: 5679 - RNA, 156 nt, synthetic construct
  misc_feature 1..156: note = Description of Artificial Sequence: Synthetic polynucleotide
  source 1..156: mol_type = other RNA
atgtggccacactgcccctcgttttagagctagaaatagcaagttaaaataaggctagtccgttatcaacttgaaaaagtggcaccgagtcggtgcttcactgctggcctccgcagtccccaccacagccagaaccttcctgaggggcagtgtggc

SEQ ID NO: 5680 - RNA, 156 nt, synthetic construct
  misc_feature 1..156: note = Description of Artificial Sequence: Synthetic polynucleotide
  source 1..156: mol_type = other RNA
atgtggccacactgcccctcgttttagagctagaaatagcaagttaaaataaggctagtccgttatcaacttgaaaaagtggcaccgagtcggtgcggtgttcactgctggcctccgcagtccccaccacagccagaaccttcctgaggggcagtg

SEQ ID NO: 5681 - RNA, 158 nt, synthetic construct
  misc_feature 1..158: note = Description of Artificial Sequence: Synthetic polynucleotide
  source 1..158: mol_type = other RNA
atgtggccacactgcccctcgttttagagctagaaatagcaagttaaaataaggctagtccgttatcaacttgaaaaagtggcaccgagtcggtgctgttcactgctggcctccgcagtccccaccacagccagaaccttcctgaggggcagtgtggc

SEQ ID NO: 5682 - RNA, 158 nt, synthetic construct
  misc_feature 1..158: note = Description of Artificial Sequence: Synthetic polynucleotide
  source 1..158: mol_type = other RNA
atgtggccacactgcccctcgttttagagctagaaatagcaagttaaaataaggctagtccgttatcaacttgaaaaagtggcaccgagtcggtgcggggtgttcactgctggcctccgcagtccccaccacagccagaaccttcctgaggggcagtg

SEQ ID NO: 5683 - RNA, 160 nt, synthetic construct
  misc_feature 1..160: note = Description of Artificial Sequence: Synthetic polynucleotide
  source 1..160: mol_type = other RNA
atgtggccacactgcccctcgttttagagctagaaatagcaagttaaaataaggctagtccgttatcaacttgaaaaagtggcaccgagtcggtgcaaggggtgttcactgctggcctccgcagtccccaccacagccagaaccttcctgaggggcagtg

SEQ ID NO: 5684 - RNA, 160 nt, synthetic construct
  misc_feature 1..160: note = Description of Artificial Sequence: Synthetic polynucleotide
  source 1..160: mol_type = other RNA
atgtggccacactgcccctcgttttagagctagaaatagcaagttaaaataaggctagtccgttatcaacttgaaaaagtggcaccgagtcggtgcggtgttcactgctggcctccgcagtccccaccacagccagaaccttcctgaggggcagtgtggc

SEQ ID NO: 5685 - RNA, 162 nt, synthetic construct
  misc_feature 1..162: note = Description of Artificial Sequence: Synthetic polynucleotide
  source 1..162: mol_type = other RNA
atgtggccacactgcccctcgttttagagctagaaatagcaagttaaaataaggctagtccgttatcaacttgaaaaagtggcaccgagtcggtgcccaaggggtgttcactgctggcctccgcagtccccaccacagccagaaccttcctgaggggcagtg

SEQ ID NO: 5686 - RNA, 162 nt, synthetic construct
  misc_feature 1..162: note = Description of Artificial Sequence: Synthetic polynucleotide
  source 1..162: mol_type = other RNA
atgtggccacactgcccctcgttttagagctagaaatagcaagttaaaataaggctagtccgttatcaacttgaaaaagtggcaccgagtcggtgcggggtgttcactgctggcctccgcagtccccaccacagccagaaccttcctgaggggcagtgtggc

SEQ ID NO: 5687 - RNA, 164 nt, synthetic construct
  misc_feature 1..164: note = Description of Artificial Sequence: Synthetic polynucleotide
  source 1..164: mol_type = other RNA
atgtggccacactgcccctcgttttagagctagaaatagcaagttaaaataaggctagtccgttatcaacttgaaaaagtggcaccgagtcggtgcaaggggtgttcactgctggcctccgcagtccccaccacagccagaaccttcctgaggggcagtgtggc

SEQ ID NO: 5688 - RNA, 164 nt, synthetic construct
  misc_feature 1..164: note = Description of Artificial Sequence: Synthetic polynucleotide
  source 1..164: mol_type = other RNA
atgtggccacactgcccctcgttttagagctagaaatagcaagttaaaataaggctagtccgttatcaacttgaaaaagtggcaccgagtcggtgcgcccaaggggtgttcactgctggcctccgcagtccccaccacagccagaaccttcctgaggggcagtg

SEQ ID NO: 5689 - RNA, 166 nt, synthetic construct
  misc_feature 1..166: note = Description of Artificial Sequence: Synthetic polynucleotide
  source 1..166: mol_type = other RNA
atgtggccacactgcccctcgttttagagctagaaatagcaagttaaaataaggctagtccgttatcaacttgaaaaagtggcaccgagtcggtgcccaaggggtgttcactgctggcctccgcagtccccaccacagccagaaccttcctgaggggcagtgtggc

SEQ ID NO: 5690 - RNA, 166 nt, synthetic construct
  misc_feature 1..166: note = Description of Artificial Sequence: Synthetic polynucleotide
  source 1..166: mol_type = other RNA
atgtggccacactgcccctcgttttagagctagaaatagcaagttaaaataaggctagtccgttatcaacttgaaaaagtggcaccgagtcggtgcacgcccaaggggtgttcactgctggcctccgcagtccccaccacagccagaaccttcctgaggggcagtg

SEQ ID NO: 5691 - RNA, 168 nt, synthetic construct
  misc_feature 1..168: note = Description of Artificial Sequence: Synthetic polynucleotide
  source 1..168: mol_type = other RNA
atgtggccacactgcccctcgttttagagctagaaatagcaagttaaaataaggctagtccgttatcaacttgaaaaagtggcaccgagtcggtgcgcccaaggggtgttcactgctggcctccgcagtccccaccacagccagaaccttcctgaggggcagtgtggc

SEQ ID NO: 5692 - RNA, 168 nt, synthetic construct
  misc_feature 1..168: note = Description of Artificial Sequence: Synthetic polynucleotide
  source 1..168: mol_type = other RNA
atgtggccacactgcccctcgttttagagctagaaatagcaagttaaaataaggctagtccgttatcaacttgaaaaagtggcaccgagtcggtgcccacgcccaaggggtgttcactgctggcctccgcagtccccaccacagccagaaccttcctgaggggcagtg

SEQ ID NO: 5693 - RNA, 170 nt, synthetic construct
  misc_feature 1..170: note = Description of Artificial Sequence: Synthetic polynucleotide
  source 1..170: mol_type = other RNA
atgtggccacactgcccctcgttttagagctagaaatagcaagttaaaataaggctagtccgttatcaacttgaaaaagtggcaccgagtcggtgcacgcccaaggggtgttcactgctggcctccgcagtccccaccacagccagaaccttcctgaggggcagtgtggc

SEQ ID NO: 5694 - RNA, 170 nt, synthetic construct
  misc_feature 1..170: note = Description of Artificial Sequence: Synthetic polynucleotide
  source 1..170: mol_type = other RNA
atgtggccacactgcccctcgttttagagctagaaatagcaagttaaaataaggctagtccgttatcaacttgaaaaagtggcaccgagtcggtgctgccacgcccaaggggtgttcactgctggcctccgcagtccccaccacagccagaaccttcctgaggggcagtg

SEQ ID NO: 5695 - RNA, 172 nt, synthetic construct
  misc_feature 1..172: note = Description of Artificial Sequence: Synthetic polynucleotide
  source 1..172: mol_type = other RNA
atgtggccacactgcccctcgttttagagctagaaatagcaagttaaaataaggctagtccgttatcaacttgaaaaagtggcaccgagtcggtgcactgccacgcccaaggggtgttcactgctggcctccgcagtccccaccacagccagaaccttcctgaggggcagtg

SEQ ID NO: 5696 - RNA, 172 nt, synthetic construct
  misc_feature 1..172: note = Description of Artificial Sequence: Synthetic polynucleotide
  source 1..172: mol_type = other RNA
atgtggccacactgcccctcgttttagagctagaaatagcaagttaaaataaggctagtccgttatcaacttgaaaaagtggcaccgagtcggtgcccacgcccaaggggtgttcactgctggcctccgcagtccccaccacagccagaaccttcctgaggggcagtgtggc

SEQ ID NO: 5697 - RNA, 174 nt, synthetic construct
  misc_feature 1..174: note = Description of Artificial Sequence: Synthetic polynucleotide
  source 1..174: mol_type = other RNA
atgtggccacactgcccctcgttttagagctagaaatagcaagttaaaataaggctagtccgttatcaacttgaaaaagtggcaccgagtcggtgctgactgccacgcccaaggggtgttcactgctggcctccgcagtccccaccacagccagaaccttcctgaggggcagtg

SEQ ID NO: 5698 - RNA, 174 nt, synthetic construct
  misc_feature 1..174: note = Description of Artificial Sequence: Synthetic polynucleotide
  source 1..174: mol_type = other RNA
atgtggccacactgcccctcgttttagagctagaaatagcaagttaaaataaggctagtccgttatcaacttgaaaaagtggcaccgagtcggtgctgccacgcccaaggggtgttcactgctggcctccgcagtccccaccacagccagaaccttcctgaggggcagtgtggc

SEQ ID NO: 5699 - RNA, 176 nt, synthetic construct
  misc_feature 1..176: note = Description of Artificial Sequence: Synthetic polynucleotide
  source 1..176: mol_type = other RNA
atgtggccacactgcccctcgttttagagctagaaatagcaagttaaaataaggctagtccgttatcaacttgaaaaagtggcaccgagtcggtgcactgccacgcccaaggggtgttcactgctggcctccgcagtccccaccacagccagaaccttcctgaggggcagtgtggc

SEQ ID NO: 5700 - RNA, 176 nt, synthetic construct
  misc_feature 1..176: note = Description of Artificial Sequence: Synthetic polynucleotide
  source 1..176: mol_type = other RNA
atgtggccacactgcccctcgttttagagctagaaatagcaagttaaaataaggctagtccgttatcaacttgaaaaagtggcaccgagtcggtgcggtgactgccacgcccaaggggtgttcactgctggcctccgcagtccccaccacagccagaaccttcctgaggggcagtg

SEQ ID NO: 5701 - RNA, 178 nt, synthetic construct
  misc_feature 1..178: note = Description of Artificial Sequence: Synthetic polynucleotide
  source 1..178: mol_type = other RNA
atgtggccacactgcccctcgttttagagctagaaatagcaagttaaaataaggctagtccgttatcaacttgaaaaagtggcaccgagtcggtgctgactgccacgcccaaggggtgttcactgctggcctccgcagtccccaccacagccagaaccttcctgaggggcagtgtggc

SEQ ID NO: 5702 - RNA, 178 nt, synthetic construct
  misc_feature 1..178: note = Description of Artificial Sequence: Synthetic polynucleotide
  source 1..178: mol_type = other RNA
atgtggccacactgcccctcgttttagagctagaaatagcaagttaaaataaggctagtccgttatcaacttgaaaaagtggcaccgagtcggtgcttggtgactgccacgcccaaggggtgttcactgctggcctccgcagtccccaccacagccagaaccttcctgaggggcagtg

SEQ ID NO: 5703 - RNA, 180 nt, synthetic construct
  misc_feature 1..180: note = Description of Artificial Sequence: Synthetic polynucleotide
  source 1..180: mol_type = other RNA
atgtggccacactgcccctcgttttagagctagaaatagcaagttaaaataaggctagtccgttatcaacttgaaaaagtggcaccgagtcggtgcggtgactgccacgcccaaggggtgttcactgctggcctccgcagtccccaccacagccagaaccttcctgaggggcagtgtggc

SEQ ID NO: 5704 - RNA, 180 nt, synthetic construct
  misc_feature 1..180: note = Description of Artificial Sequence: Synthetic polynucleotide
  source 1..180: mol_type = other RNA
atgtggccacactgcccctcgttttagagctagaaatagcaagttaaaataaggctagtccgttatcaacttgaaaaagtggcaccgagtcggtgcatttggtgactgccacgcccaaggggtgttcactgctggcctccgcagtccccaccacagccagaaccttcctgaggggcagtg

SEQ ID NO: 5705 - RNA, 182 nt, synthetic construct
  misc_feature 1..182: note = Description of Artificial Sequence: Synthetic polynucleotide
  source 1..182: mol_type = other RNA
atgtggccacactgcccctcgttttagagctagaaatagcaagttaaaataaggctagtccgttatcaacttgaaaaagtggcaccgagtcggtgcttggtgactgccacgcccaaggggtgttcactgctggcctccgcagtccccaccacagccagaaccttcctgaggggcagtgtggc

SEQ ID NO: 5706 - RNA, 20 nt, synthetic construct
  misc_feature 1..20: note = Description of Artificial Sequence: Synthetic oligonucleotide
  source 1..20: mol_type = other RNA
ggccacactgcccctcagga

SEQ ID NO: 5707-5709 - skipped (3 entries)

SEQ ID NO: 5710 - RNA, 10 nt, synthetic construct
  misc_feature 1..10: note = Description of Artificial Sequence: Synthetic oligonucleotide
  source 1..10: mol_type = other RNA
tgaggggcag

SEQ ID NO: 5711 - RNA, 11 nt, synthetic construct
  misc_feature 1..11: note = Description of Artificial Sequence: Synthetic oligonucleotide
  source 1..11: mol_type = other RNA
tgaggggcagt

SEQ ID NO: 5712 - RNA, 12 nt, synthetic construct
  misc_feature 1..12: note = Description of Artificial Sequence: Synthetic oligonucleotide
  source 1..12: mol_type = other RNA
tgaggggcagtg

SEQ ID NO: 5713 - RNA, 13 nt, synthetic construct
  misc_feature 1..13: note = Description of Artificial Sequence: Synthetic oligonucleotide
  source 1..13: mol_type = other RNA
tgaggggcagtgt

SEQ ID NO: 5714 - RNA, 14 nt, synthetic construct
  misc_feature 1..14: note = Description of Artificial Sequence: Synthetic oligonucleotide
  source 1..14: mol_type = other RNA
tgaggggcagtgtg

SEQ ID NO: 5715 - RNA, 15 nt, synthetic construct
  misc_feature 1..15: note = Description of Artificial Sequence: Synthetic oligonucleotide
  source 1..15: mol_type = other RNA
tgaggggcagtgtgg

SEQ ID NO: 5716 - RNA, 16 nt, synthetic construct
  misc_feature 1..16: note = Description of Artificial Sequence: Synthetic oligonucleotide
  source 1..16: mol_type = other RNA
tgaggggcagtgtggc

SEQ ID NO: 5717 - RNA, 17 nt, synthetic construct
  misc_feature 1..17: note = Description of Artificial Sequence: Synthetic oligonucleotide
  source 1..17: mol_type = other RNA
tgaggggcagtgtggcc

SEQ ID NO: 5718 - RNA, 36 nt, synthetic construct
  misc_feature 1..36: note = Description of Artificial Sequence: Synthetic oligonucleotide
  source 1..36: mol_type = other RNA
tggcctccgcagtccccaccacagccagaaccttcc

SEQ ID NO: 5719 - RNA, 38 nt, synthetic construct
  misc_feature 1..38: note = Description of Artificial Sequence: Synthetic oligonucleotide
  source 1..38: mol_type = other RNA
gctggcctccgcagtccccaccacagccagaaccttcc

SEQ ID NO: 5720 - RNA, 40 nt, synthetic construct
  misc_feature 1..40: note = Description of Artificial Sequence: Synthetic oligonucleotide
  source 1..40: mol_type = other RNA
ctgctggcctccgcagtccccaccacagccagaaccttcc

SEQ ID NO: 5721 - RNA, 42 nt, synthetic construct
  misc_feature 1..42: note = Description of Artificial Sequence: Synthetic oligonucleotide
  source 1..42: mol_type = other RNA
cactgctggcctccgcagtccccaccacagccagaaccttcc

SEQ ID NO: 5722 - RNA, 44 nt, synthetic construct
  misc_feature 1..44: note = Description of Artificial Sequence: Synthetic oligonucleotide
  source 1..44: mol_type = other RNA
ttcactgctggcctccgcagtccccaccacagccagaaccttcc

SEQ ID NO: 5723 - RNA, 46 nt, synthetic construct
  misc_feature 1..46: note = Description of Artificial Sequence: Synthetic oligonucleotide
  source 1..46: mol_type = other RNA
tgttcactgctggcctccgcagtccccaccacagccagaaccttcc

SEQ ID NO: 5724 - RNA, 48 nt, synthetic construct
  misc_feature 1..48: note = Description of Artificial Sequence: Synthetic oligonucleotide
  source 1..48: mol_type = other RNA
ggtgttcactgctggcctccgcagtccccaccacagccagaaccttcc

SEQ ID NO: 5725 - RNA, 50 nt, synthetic construct
  misc_feature 1..50: note = Description of Artificial Sequence: Synthetic oligonucleotide
  source 1..50: mol_type = other RNA
ggggtgttcactgctggcctccgcagtccccaccacagccagaaccttcc

SEQ ID NO: 5726 - RNA, 52 nt, synthetic construct
  misc_feature 1..52: note = Description of Artificial Sequence: Synthetic oligonucleotide
  source 1..52: mol_type = other RNA
aaggggtgttcactgctggcctccgcagtccccaccacagccagaaccttcc

SEQ ID NO: 5727 - RNA, 54 nt, synthetic construct
  misc_feature 1..54: note = Description of Artificial Sequence: Synthetic oligonucleotide
  source 1..54: mol_type = other RNA
ccaaggggtgttcactgctggcctccgcagtccccaccacagccagaaccttcc

SEQ ID NO: 5728 - RNA, 56 nt, synthetic construct
  misc_feature 1..56: note = Description of Artificial Sequence: Synthetic oligonucleotide
  source 1..56: mol_type = other RNA
gcccaaggggtgttcactgctggcctccgcagtccccaccacagccagaaccttcc

SEQ ID NO: 5729 - RNA, 58 nt, synthetic construct
  misc_feature 1..58: note = Description of Artificial Sequence: Synthetic oligonucleotide
  source 1..58: mol_type = other RNA
acgcccaaggggtgttcactgctggcctccgcagtccccaccacagccagaaccttcc

SEQ ID NO: 5730 - RNA, 60 nt, synthetic construct
  misc_feature 1..60: note = Description of Artificial Sequence: Synthetic oligonucleotide
  source 1..60: mol_type = other RNA
ccacgcccaaggggtgttcactgctggcctccgcagtccccaccacagccagaaccttcc

SEQ ID NO: 5731 - RNA, 62 nt, synthetic construct
  misc_feature 1..62: note = Description of Artificial Sequence: Synthetic oligonucleotide
  source 1..62: mol_type = other RNA
tgccacgcccaaggggtgttcactgctggcctccgcagtccccaccacagccagaaccttcc

SEQ ID NO: 5732 - RNA, 64 nt, synthetic construct
  misc_feature 1..64: note = Description of Artificial Sequence: Synthetic oligonucleotide
  source 1..64: mol_type = other RNA
actgccacgcccaaggggtgttcactgctggcctccgcagtccccaccacagccagaaccttcc

SEQ ID NO: 5733 - RNA, 66 nt, synthetic construct
  misc_feature 1..66: note = Description of Artificial Sequence: Synthetic oligonucleotide
  source 1..66: mol_type = other RNA
tgactgccacgcccaaggggtgttcactgctggcctccgcagtccccaccacagccagaaccttcc

SEQ ID NO: 5734 - RNA, 68 nt, synthetic construct
  misc_feature 1..68: note = Description of Artificial Sequence: Synthetic oligonucleotide
  source 1..68: mol_type = other RNA
ggtgactgccacgcccaaggggtgttcactgctggcctccgcagtccccaccacagccagaaccttcc

SEQ ID NO: 5735 - RNA, 70 nt, synthetic construct
  misc_feature 1..70: note = Description of Artificial Sequence: Synthetic oligonucleotide
  source 1..70: mol_type = other RNA
ttggtgactgccacgcccaaggggtgttcactgctggcctccgcagtccccaccacagccagaaccttcc

SEQ ID NO: 5736 - RNA, 72 nt, synthetic construct
  misc_feature 1..72: note = Description of Artificial Sequence: Synthetic oligonucleotide
  source 1..72: mol_type = other RNA
atttggtgactgccacgcccaaggggtgttcactgctggcctccgcagtccccaccacagccagaaccttcc

SEQ ID NO: 5737 - RNA, 74 nt, synthetic construct
  misc_feature 1..74: note = Description of Artificial Sequence: Synthetic oligonucleotide
  source 1..74: mol_type = other RNA
gtatttggtgactgccacgcccaaggggtgttcactgctggcctccgcagtccccaccacagccagaaccttcc

SEQ ID NO: 5738 - RNA, 76 nt, synthetic construct
  misc_feature 1..76: note = Description of Artificial Sequence: Synthetic oligonucleotide
  source 1..76: mol_type = other RNA
cagtatttggtgactgccacgcccaaggggtgttcactgctggcctccgcagtccccaccacagccagaaccttcc

SEQ ID NO: 5739 - RNA, 140 nt, synthetic construct
  misc_feature 1..140: note = Description of Artificial Sequence: Synthetic polynucleotide
  source 1..140: mol_type = other RNA
ggccacactgcccctcaggagttttagagctagaaatagcaagttaaaataaggctagtccgttatcaacttgaaaaagtggcaccgagtcggtgctggcctccgcagtccccaccacagccagaaccttcctgaggggc

SEQ ID NO: 5740 - RNA, 142 nt, synthetic construct
  misc_feature 1..142: note = Description of Artificial Sequence: Synthetic polynucleotide
  source 1..142: mol_type = other RNA
ggccacactgcccctcaggagttttagagctagaaatagcaagttaaaataaggctagtccgttatcaacttgaaaaagtggcaccgagtcggtgcgctggcctccgcagtccccaccacagccagaaccttcctgaggggc

SEQ ID NO: 5741 - RNA, 144 nt, synthetic construct
  misc_feature 1..144: note = Description of Artificial Sequence: Synthetic polynucleotide
  source 1..144: mol_type = other RNA
ggccacactgcccctcaggagttttagagctagaaatagcaagttaaaataaggctagtccgttatcaacttgaaaaagtggcaccgagtcggtgctggcctccgcagtccccaccacagccagaaccttcctgaggggcagtg

SEQ ID NO: 5742 - RNA, 144 nt, synthetic construct
  misc_feature 1..144: note = Description of Artificial Sequence: Synthetic polynucleotide
  source 1..144: mol_type = other RNA
ggccacactgcccctcaggagttttagagctagaaatagcaagttaaaataaggctagtccgttatcaacttgaaaaagtggcaccgagtcggtgcctgctggcctccgcagtccccaccacagccagaaccttcctgaggggc

SEQ ID NO: 5743 - RNA, 146 nt, synthetic construct
  misc_feature 1..146: note = Description of Artificial Sequence: Synthetic polynucleotide
  source 1..146: mol_type = other RNA
ggccacactgcccctcaggagttttagagctagaaatagcaagttaaaataaggctagtccgttatcaacttgaaaaagtggcaccgagtcggtgccactgctggcctccgcagtccccaccacagccagaaccttcctgaggggc

SEQ ID NO: 5744 - RNA, 146 nt, synthetic construct
  misc_feature 1..146: note = Description of Artificial Sequence: Synthetic polynucleotide
  source 1..146: mol_type = other RNA
ggccacactgcccctcaggagttttagagctagaaatagcaagttaaaataaggctagtccgttatcaacttgaaaaagtggcaccgagtcggtgcgctggcctccgcagtccccaccacagccagaaccttcctgaggggcagtg

SEQ ID NO: 5745 - RNA, 148 nt, synthetic construct
  misc_feature 1..148: note = Description of Artificial Sequence: Synthetic polynucleotide
  source 1..148: mol_type = other RNA
ggccacactgcccctcaggagttttagagctagaaatagcaagttaaaataaggctagtccgttatcaacttgaaaaagtggcaccgagtcggtgcttcactgctggcctccgcagtccccaccacagccagaaccttcctgaggggc

SEQ ID NO: 5746 - RNA, 148 nt, synthetic construct
  misc_feature 1..148: note = Description of Artificial Sequence: Synthetic polynucleotide
  source 1..148: mol_type = other RNA
ggccacactgcccctcaggagttttagagctagaaatagcaagttaaaataaggctagtccgttatcaacttgaaaaagtggcaccgagtcggtgcctgctggcctccgcagtccccaccacagccagaaccttcctgaggggcagtg

SEQ ID NO: 5747 - RNA, 150 nt, synthetic construct
  misc_feature 1..150: note = Description of Artificial Sequence: Synthetic polynucleotide
  source 1..150: mol_type = other RNA
ggccacactgcccctcaggagttttagagctagaaatagcaagttaaaataaggctagtccgttatcaacttgaaaaagtggcaccgagtcggtgccactgctggcctccgcagtccccaccacagccagaaccttcctgaggggcagtg

SEQ ID NO: 5748 - RNA, 150 nt, synthetic construct
  misc_feature 1..150: note = Description of Artificial Sequence: Synthetic polynucleotide
  source 1..150: mol_type = other RNA
ggccacactgcccctcaggagttttagagctagaaatagcaagttaaaataaggctagtccgttatcaacttgaaaaagtggcaccgagtcggtgctgttcactgctggcctccgcagtccccaccacagccagaaccttcctgaggggc

SEQ ID NO: 5749 - RNA, 152 nt, synthetic construct
  misc_feature 1..152: note = Description of Artificial Sequence: Synthetic polynucleotide
  source 1..152: mol_type = other RNA
ggccacactgcccctcaggagttttagagctagaaatagcaagttaaaataaggctagtccgttatcaacttgaaaaagtggcaccgagtcggtgcggtgttcactgctggcctccgcagtccccaccacagccagaaccttcctgaggggc

SEQ ID NO: 5750 - RNA, 152 nt, synthetic construct
  misc_feature 1..152: note = Description of Artificial Sequence: Synthetic polynucleotide
  source 1..152: mol_type = other RNA
ggccacactgcccctcaggagttttagagctagaaatagcaagttaaaataaggctagtccgttatcaacttgaaaaagtggcaccgagtcggtgcttcactgctggcctccgcagtccccaccacagccagaaccttcctgaggggcagtg

SEQ ID NO: 5751 - RNA, 154 nt, synthetic construct
  misc_feature 1..154: note = Description of Artificial Sequence: Synthetic polynucleotide
  source 1..154: mol_type = other RNA
ggccacactgcccctcaggagttttagagctagaaatagcaagttaaaataaggctagtccgttatcaacttgaaaaagtggcaccgagtcggtgcggggtgttcactgctggcctccgcagtccccaccacagccagaaccttcctgaggggc

SEQ ID NO: 5752 - RNA, 154 nt, synthetic construct
  misc_feature 1..154: note = Description of Artificial Sequence: Synthetic polynucleotide
  source 1..154: mol_type = other RNA
ggccacactgcccctcaggagttttagagctagaaatagcaagttaaaataaggctagtccgttatcaacttgaaaaagtggcaccgagtcggtgctgttcactgctggcctccgcagtccccaccacagccagaaccttcctgaggggcagtg

SEQ ID NO: 5753 - RNA, 156 nt, synthetic construct
  misc_feature 1..156: note = Description of Artificial Sequence: Synthetic polynucleotide
  source 1..156: mol_type = other RNA
ggccacactgcccctcaggagttttagagctagaaatagcaagttaaaataaggctagtccgttatcaacttgaaaaagtggcaccgagtcggtgcaaggggtgttcactgctggcctccgcagtccccaccacagccagaaccttcctgaggggc

SEQ ID NO: 5754 - RNA, 156 nt, synthetic construct
  misc_feature 1..156: note = Description of Artificial Sequence: Synthetic polynucleotide
  source 1..156: mol_type = other RNA
ggccacactgcccctcaggagttttagagctagaaatagcaagttaaaataaggctagtccgttatcaacttgaaaaagtggcaccgagtcggtgcggtgttcactgctggcctccgcagtccccaccacagccagaaccttcctgaggggcagtg

SEQ ID NO: 5755 - RNA, 158 nt, synthetic construct
  misc_feature 1..158: note = Description of Artificial Sequence: Synthetic polynucleotide
  source 1..158: mol_type = other RNA
ggccacactgcccctcaggagttttagagctagaaatagcaagttaaaataaggctagtccgttatcaacttgaaaaagtggcaccgagtcggtgcggggtgttcactgctggcctccgcagtccccaccacagccagaaccttcctgaggggcagtg

SEQ ID NO: 5756 - RNA, 158 nt, synthetic construct
  misc_feature 1..158: note = Description of Artificial Sequence: Synthetic polynucleotide
  source 1..158: mol_type = other RNA
ggccacactgcccctcaggagttttagagctagaaatagcaagttaaaataaggctagtccgttatcaacttgaaaaagtggcaccgagtcggtgcccaaggggtgttcactgctggcctccgcagtccccaccacagccagaaccttcctgaggggc

SEQ ID NO: 5757 - RNA, 160 nt, synthetic construct
  misc_feature 1..160: note = Description of Artificial Sequence: Synthetic polynucleotide
  source 1..160: mol_type = other RNA
ggccacactgcccctcaggagttttagagctagaaatagcaagttaaaataaggctagtccgttatcaacttgaaaaagtggcaccgagtcggtgcgcccaaggggtgttcactgctggcctccgcagtccccaccacagccagaaccttcctgaggggc

SEQ ID NO: 5758 - RNA, 160 nt, synthetic construct
  misc_feature 1..160: note = Description of Artificial Sequence: Synthetic polynucleotide
  source 1..160: mol_type = other RNA
ggccacactgcccctcaggagttttagagctagaaatagcaagttaaaataaggctagtccgttatcaacttgaaaaagtggcaccgagtcggtgcaaggggtgttcactgctggcctccgcagtccccaccacagccagaaccttcctgaggggcagtg

SEQ ID NO: 5759 - RNA, 162 nt, synthetic construct
  misc_feature 1..162: note = Description of Artificial Sequence: Synthetic polynucleotide
  source 1..162: mol_type = other RNA
ggccacactgcccctcaggagttttagagctagaaatagcaagttaaaataaggctagtccgttatcaacttgaaaaagtggcaccgagtcggtgcacgcccaaggggtgttcactgctggcctccgcagtccccaccacagccagaaccttcctgaggggc

SEQ ID NO: 5760 - RNA, 162 nt, synthetic construct
  misc_feature 1..162: note = Description of Artificial Sequence: Synthetic polynucleotide
  source 1..162: mol_type = other RNA
ggccacactgcccctcaggagttttagagctagaaatagcaagttaaaataaggctagtccgttatcaacttgaaaaagtggcaccgagtcggtgcccaaggggtgttcactgctggcctccgcagtccccaccacagccagaaccttcctgaggggcagtg

SEQ ID NO: 5761 - RNA, 164 nt, synthetic construct
  misc_feature 1..164: note = Description of Artificial Sequence: Synthetic polynucleotide
  source 1..164: mol_type = other RNA
ggccacactgcccctcaggagttttagagctagaaatagcaagttaaaataaggctagtccgttatcaacttgaaaaagtggcaccgagtcggtgcccacgcccaaggggtgttcactgctggcctccgcagtccccaccacagccagaaccttcctgaggggc

SEQ ID NO: 5762 - RNA, 164 nt, synthetic construct
  misc_feature 1..164: note = Description of Artificial Sequence: Synthetic polynucleotide
  source 1..164: mol_type = other RNA
ggccacactgcccctcaggagttttagagctagaaatagcaagttaaaataaggctagtccgttatcaacttgaaaaagtggcaccgagtcggtgcgcccaaggggtgttcactgctggcctccgcagtccccaccacagccagaaccttcctgaggggcagtg

SEQ ID NO: 5763 - RNA, 166 nt, synthetic construct
  misc_feature 1..166: note = Description of Artificial Sequence: Synthetic polynucleotide
  source 1..166: mol_type = other RNA
ggccacactgcccctcaggagttttagagctagaaatagcaagttaaaataaggctagtccgttatcaacttgaaaaagtggcaccgagtcggtgcacgcccaaggggtgttcactgctggcctccgcagtccccaccacagccagaaccttcctgaggggcagtg

SEQ ID NO: 5764 - RNA, 166 nt, synthetic construct
  misc_feature 1..166: note = Description of Artificial Sequence: Synthetic polynucleotide
  source 1..166: mol_type = other RNA
ggccacactgcccctcaggagttttagagctagaaatagcaagttaaaataaggctagtccgttatcaacttgaaaaagtggcaccgagtcggtgctgccacgcccaaggggtgttcactgctggcctccgcagtccccaccacagccagaaccttcctgaggggc

SEQ ID NO: 5765 - RNA, 168 nt, synthetic construct
  misc_feature 1..168: note = Description of Artificial Sequence: Synthetic polynucleotide
  source 1..168: mol_type = other RNA
ggccacactgcccctcaggagttttagagctagaaatagcaagttaaaataaggctagtccgttatcaacttgaaaaagtggcaccgagtcggtgcactgccacgcccaaggggtgttcactgctggcctccgcagtccccaccacagccagaaccttcctgaggggc

SEQ ID NO: 5766 - RNA, 168 nt, synthetic construct
  misc_feature 1..168: note = Description of Artificial Sequence: Synthetic polynucleotide
  source 1..168: mol_type = other RNA
ggccacactgcccctcaggagttttagagctagaaatagcaagttaaaataaggctagtccgttatcaacttgaaaaagtggcaccgagtcggtgcccacgcccaaggggtgttcactgctggcctccgcagtccccaccacagccagaaccttcctgaggggcagtg

SEQ ID NO: 5767 - RNA, 170 nt, synthetic construct
  misc_feature 1..170: note = Description of Artificial Sequence: Synthetic polynucleotide
  source 1..170: mol_type = other RNA
ggccacactgcccctcaggagttttagagctagaaatagcaagttaaaataaggctagtccgttatcaacttgaaaaagtggcaccgagtcggtgctgactgccacgcccaaggggtgttcactgctggcctccgcagtccccaccacagccagaaccttcctgaggggc

SEQ ID NO: 5768 - RNA, 170 nt, synthetic construct
  misc_feature 1..170: note = Description of Artificial Sequence: Synthetic polynucleotide
  source 1..170: mol_type = other RNA
ggccacactgcccctcaggagttttagagctagaaatagcaagttaaaataaggctagtccgttatcaacttgaaaaagtggcaccgagtcggtgctgccacgcccaaggggtgttcactgctggcctccgcagtccccaccacagccagaaccttcctgaggggcagtg

SEQ ID NO: 5769 - RNA, 172 nt, synthetic construct
  misc_feature 1..172: note = Description of Artificial Sequence: Synthetic polynucleotide
  source 1..172: mol_type = other RNA
ggccacactgcccctcaggagttttagagctagaaatagcaagttaaaataaggctagtccgttatcaacttgaaaaagtggcaccgagtcggtgcactgccacgcccaaggggtgttcactgctggcctccgcagtccccaccacagccagaaccttcctgaggggcagtg

SEQ ID NO: 5770 - RNA, 172 nt, synthetic construct
  misc_feature 1..172: note = Description of Artificial Sequence: Synthetic polynucleotide
  source 1..172: mol_type = other RNA
ggccacactgcccctcaggagttttagagctagaaatagcaagttaaaataaggctagtccgttatcaacttgaaaaagtggcaccgagtcggtgcggtgactgccacgcccaaggggtgttcactgctggcctccgcagtccccaccacagccagaaccttcctgaggggc

SEQ ID NO: 5771 - RNA, 174 nt, synthetic construct
  misc_feature 1..174: note = Description of Artificial Sequence: Synthetic polynucleotide
  source 1..174: mol_type = other RNA
ggccacactgcccctcaggagttttagagctagaaatagcaagttaaaataaggctagtccgttatcaacttgaaaaagtggcaccgagtcggtgctgactgccacgcccaaggggtgttcactgctggcctccgcagtccccaccacagccagaaccttcctgaggggcagtg

SEQ ID NO: 5772 - RNA, 174 nt, synthetic construct
  misc_feature 1..174: note = Description of Artificial Sequence: Synthetic polynucleotide
  source 1..174: mol_type = other RNA
ggccacactgcccctcaggagttttagagctagaaatagcaagttaaaataaggctagtccgttatcaacttgaaaaagtggcaccgagtcggtgcttggtgactgccacgcccaaggggtgttcactgctggcctccgcagtccccaccacagccagaaccttcctgaggggc

SEQ ID NO: 5773 - RNA, 176 nt, synthetic construct
  misc_feature 1..176: note = Description of Artificial Sequence: Synthetic polynucleotide
  source 1..176: mol_type = other RNA
ggccacactgcccctcaggagttttagagctagaaatagcaagttaaaataaggctagtccgttatcaacttgaaaaagtggcaccgagtcggtgcatttggtgactgccacgcccaaggggtgttcactgctggcctccgcagtccccaccacagccagaaccttcctgaggggc

SEQ ID NO: 5774 - RNA, 176 nt, synthetic construct
  misc_feature 1..176: note = Description of Artificial Sequence: Synthetic polynucleotide
  source 1..176: mol_type = other RNA
ggccacactgcccctcaggagttttagagctagaaatagcaagttaaaataaggctagtccgttatcaacttgaaaaagtggcaccgagtcggtgcggtgactgccacgcccaaggggtgttcactgctggcctccgcagtccccaccacagccagaaccttcctgaggggcagtg

SEQ ID NO: 5775 - RNA, 178 nt, synthetic construct
  misc_feature 1..178: note = Description of Artificial Sequence: Synthetic polynucleotide
  source 1..178: mol_type = other RNA
ggccacactgcccctcaggagttttagagctagaaatagcaagttaaaataaggctagtccgttatcaacttgaaaaagtggcaccgagtcggtgcttggtgactgccacgcccaaggggtgttcactgctggcctccgcagtccccaccacagccagaaccttcctgaggggcagtg

SEQ ID NO: 5776 - RNA, 178 nt, synthetic construct
  misc_feature 1..178: note = Description of Artificial Sequence: Synthetic polynucleotide
  source 1..178: mol_type = other RNA
ggccacactgcccctcaggagttttagagctagaaatagcaagttaaaataaggctagtccgttatcaacttgaaaaagtggcaccgagtcggtgcgtatttggtgactgccacgcccaaggggtgttcactgctggcctccgcagtccccaccacagccagaaccttcctgaggggc

SEQ ID NO: 5777 - RNA, 180 nt, synthetic construct
  misc_feature 1..180: note = Description of Artificial Sequence: Synthetic polynucleotide
  source 1..180: mol_type = other RNA
ggccacactgcccctcaggagttttagagctagaaatagcaagttaaaataaggctagtccgttatcaacttgaaaaagtggcaccgagtcggtgcatttggtgactgccacgcccaaggggtgttcactgctggcctccgcagtccccaccacagccagaaccttcctgaggggcagtg

SEQ ID NO: 5778 - RNA, 180 nt, synthetic construct
  misc_feature 1..180: note = Description of Artificial Sequence: Synthetic polynucleotide
  source 1..180: mol_type = other RNA
ggccacactgcccctcaggagttttagagctagaaatagcaagttaaaataaggctagtccgttatcaacttgaaaaagtggcaccgagtcggtgccagtatttggtgactgccacgcccaaggggtgttcactgctggcctccgcagtccccaccacagccagaaccttcctgaggggc

SEQ ID NO: 5779 - RNA, 182 nt, synthetic construct
  misc_feature 1..182: note = Description of Artificial Sequence: Synthetic polynucleotide
  source 1..182: mol_type = other RNA
ggccacactgcccctcaggagttttagagctagaaatagcaagttaaaataaggctagtccgttatcaacttgaaaaagtggcaccgagtcggtgcgtatttggtgactgccacgcccaaggggtgttcactgctggcctccgcagtccccaccacagccagaaccttcctgaggggcagtg

SEQ ID NO: 5780 - protein, 677 aa, Murine leukemia virus
TLNIEDEHRLHETSKEPDVSLGSTWLSDFPQAWAETGGMGLAVRQAPLIIPLKATSTPVSIKQYPMSQEARLGIKPHIQRLLDQGILVPCQSPWNTPLLPVKKPGTNDYRPVQDLREVNKRVEDIHPTVPNPYNLLSGLPPSHQWYTVLDLKDAFFCLRLHPTSQPLFAFEWRDPEMGISGQLTWTRLPQGFKNSPTLFDEALHRDLADFRIQHPDLILLQYVDDLLLAATSELDCQQGTRALLQTLGNLGYRASAKKAQICQKQVKYLGYLLKEGQRWLTEARKETVMGQPTPKTPRQLREFLGTAGFCRLWIPGFAEMAAPLYPLTKTGTLFNWGPDQQKAYQEIKQALLTAPALGLPDLTKPFELFVDEKQGYAKGVLTQKLGPWRRPVAYLSKKLDPVAAGWPPCLRMVAAIAVLTKDAGKLTMGQPLVILAPHAVEALVKQPPDRWLSNARMTHYQALLLDTDRVQFGPVVALNPATLLPLPEEGLQHNCLDILAEAHGTRPDLTDQPLPDADHTWYTDGSSLLQEGQRKAGAAVTTETEVIWAKALPAGTSAQRAELIALTQALKMAEGKKLNVYTDSRYAFATAHIHGEIYRRRGLLTSEGKEIKNKDEILALLKALFLPKRLSIIHCPGHQKGHSAEARGNRMADQAARKAAITETPDTSTLLIENSSP

SEQ ID NO: 5781 - protein, 677 aa, synthetic construct
  REGION 1..677: note = Description of Artificial Sequence: Synthetic polypeptide
TLNIEDEYRLHETSKEPDVSLGSTWLSDFPQAWAETGGMGLAVRQAPLIIPLKATSTPVSIKQYPMSQEARLGIKPHIQRLLDQGILVPCQSPWNTPLLPVKKPGTNDYRPVQDLREVNKRVEDIHPTVPNPYNLLSGLPPSHQWYTVLDLKDAFFCLRLHPTSQPLFAFEWRDPEMGISGQLTWTRLPQGFKNSPTLFDEALHRDLADFRIQHPDLILLQYVDDLLLAATSELDCQQGTRALLQTLGNLGYRASAKKAQICQKQVKYLGYLLKEGQRWLTEARKETVMGQPTPKTPRQLREFLGTAGFCRLWIPGFAEMAAPLYPLTKTGTLFNWGPDQQKAYQEIKQALLTAPALGLPDLTKPFELFVDEKQGYAKGVLTQKLGPWRRPVAYLSKKLDPVAAGWPPCLRMVAAIAVLTKDAGKLTMGQPLVILAPHAVEALVKQPPDRWLSNARMTHYQALLLDTDRVQFGPVVALNPATLLPLPEEGLQHNCLDILAEAHGTRPDLTDQPLPDADHTWYTDGSSLLQEGQRKAGAAVTTETEVIWAKALPAGTSAQRAELIALTQALKMAEGKKLNVYTDSRYAFATAHIHGEIYRRRGLLTSEGKEIKNKDEILALLKALFLPKRLSIIHCPGHQKGHSAEARGNRMADQAARKAAITETPDTSTLLIENSSP

SEQ ID NO: 5782 - protein, 677 aa, synthetic construct
  REGION 1..677: note = Description of Artificial Sequence: Synthetic polypeptide
TLNIEDEYRLHETSKEPDVSLGSTWLSDFPQAWAETGGMGLAVRQAPLIIPLKATSTPVSIKQYPMSQEARLGIKPHIQRLLDQGILVPCQSPWNTPLLPVKKPGTNDYRPVQDLREVNKRVEDIHPTVPNPYNLLSGLPPSHQWYTVLDLKDAFFCLRLHPTSQPLFAFEWRDPEMGISGQLTWTRLPQGFKNSPTLFNEALHRDLADFRIQHPDLILLQYVDDLLLAATSELDCQQGTRALLQTLGNLGYRASAKKAQICQKQVKYLGYLLKEGQRWLTEARKETVMGQPTPKTPRQLREFLGKAGFCRLFIPGFAEMAAPLYPLTKPGTLFNWGPDQQKAYQEIKQALLTAPALGLPDLTKPFELFVDEKQGYAKGVLTQKLGPWRRPVAYLSKKLDPVAAGWPPCLRMVAAIAVLTKDAGKLTMGQPLVILAPHAVEALVKQPPDRWLSNARMTHYQALLLDTDRVQFGPVVALNPATLLPLPEEGLQHNCLDILAEAHGTRPDLTDQPLPDADHTWYTDGSSLLQEGQRKAGAAVTTETEVIWAKALPAGTSAQRAELIALTQALKMAEGKKLNVYTDSRYAFATAHIHGEIYRRRGWLTSEGKEIKNKDEILALLKALFLPKRLSIIHCPGHQKGHSAEARGNRMADQAARKAAITETPDTSTLLIENSSP

SEQ ID NO: 5783 - protein, 1368 aa, Streptococcus pyogenes [sequence omitted]

SEQ ID NO: 5784 - protein, 1367 aa, Streptococcus pyogenes
DKKYSIGLDIGTNSVGWAVITDEYKVPSKKFKVLGNTDRHSIKKNLIGALLFDSGETAEATRLKRTARRRYTRRKNRICYLQEIFSNEMAKVDDSFFHRLEESFLVEEDKKHERHPIFGNIVDEVAYHEKYPTIYHLRKKLVDSTDKADLRLIYLALAHMIKFRGHFLIEGDLNPDNSDVDKLFIQLVQTYNQLFEENPINASGVDAKAILSARLSKSRRLENLIAQLPGEKKNGLFGNLIALSLGLTPNFKSNFDLAEDAKLQLSKDTYDDDLDNLLAQIGDQYADLFLAAKNLSDAILLSDILRVNTEITKAPLSASMIKRYDEHHQDLTLLKALVRQQLPEKYKEIFFDQSKNGYAGYIDGGASQEEFYKFIKPILEKMDGTEELLVKLNREDLLRKQRTFDNGSIPHQIHLGELHAILRRQEDFYPFLKDNREKIEKILTFRIPYYVGPLARGNSRFAWMTRKSEETITPWNFEEVVDKGASAQSFIERMTNFDKNLPNEKVLPKHSLLYEYFTVYNELTKVKYVTEGMRKPAFLSGEQKKAIVDLLFKTNRKVTVKQLKEDYFKKIECFDSVEISGVEDRFNASLGTYHDLLKIIKDKDFLDNEENEDILEDIVLTLTLFEDREMIEERLKTYAHLFDDKVMKQLKRRRYTGWGRLSRKLINGIRDKQSGKTILDFLKSDGFANRNFMQLIHDDSLTFKEDIQKAQVSGQGDSLHEHIANLAGSPAIKKGILQTVKVVDELVKVMGRHKPENIVIEMARENQTTQKGQKNSRERMKRIEEGIKELGSQILKEHPVENTQLQNEKLYLYYLQNGRDMYVDQELDINRLSDYDVDHIVPQSFLKDDSIDNKVLTRSDKNRGKSDNVPSEEVVKKMKNYWRQLLNAKLITQRKFDNLTKAERGGLSELDKAGFIKRQLVETRQITKHVAQILDSRMNTKYDENDKLIREVKVITLKSKLVSDFRKDFQFYKVREINNYHHAHDAYLNAVVGTALIKKYPKLESEFVYGDYKVYDVRKMIAKSEQEIGKATAKYFFYSNIMNFFKTEITLANGEIRKRPLIETNGETGEIVWDKGRDFATVRKVLSMPQVNIVKKTEVQTGGFSKESILPKRNSDKLIARKKDWDPKKYGGFDSPTVAYSVLVVAKVEKGKSKKLKSVKELLGITIMERSSFEKNPIDFLEAKGYKEVKKDLIIKLPKYSLFELENGRKRMLASAGELQKGNELALPSKYVNFLYLASHYEKLKGSPEDNEQKQLFVEQHKHYLDEIIEQISEFSKRVILADANLDKVLSAYNKHRDKPIREQAENIIHLFTLTNLGAPAAFKYFDTTIDRKRYTSTKEVLDATLIHQSITGLYETRIDLSQLGGD

SEQ ID NO: 5785 - protein, 1368 aa, synthetic construct
  REGION 1..1368: note = Description of Artificial Sequence: Synthetic polypeptide
MDKKYSIGLDIGTNSVGWAVITDEYKVPSKKFKVLGNTDRHSIKKNLIGALLFDSGETAEATRLKRTARRRYTRRKNRICYLQEIFSNEMAKVDDSFFHRLEESFLVEEDKKHERHPIFGNIVDEVAYHEKYPTIYHLRKKLVDSTDKADLRLIYLALAHMIKFRGHFLIEGDLNPDNSDVDKLFIQLVQTYNQLFEENPINASGVDAKAILSARLSKSRRLENLIAQLPGEKKNGLFGNLIALSLGLTPNFKSNFDLAEDAKLQLSKDTYDDDLDNLLAQIGDQYADLFLAAKNLSDAILLSDILRVNTEITKAPLSASMIKRYDEHHQDLTLLKALVRQQLPEKYKEIFFDQSKNGYAGYIDGGASQEEFYKFIKPILEKMDGTEELLVKLNREDLLRKQRTFDNGSIPHQIHLGELHAILRRQEDFYPFLKDNREKIEKILTFRIPYYVGPLARGNSRFAWMTRKSEETITPWNFEEVVDKGASAQSFIERMTNFDKNLPNEKVLPKHSLLYEYFTVYNELTKVKYVTEGMRKPAFLSGEQKKAIVDLLFKTNRKVTVKQLKEDYFKKIECFDSVEISGVEDRFNASLGTYHDLLKIIKDKDFLDNEENEDILEDIVLTLTLFEDREMIEERLKTYAHLFDDKVMKQLKRRRYTGWGRLSRKLINGIRDKQSGKTILDFLKSDGFANRNFMQLIHDDSLTFKEDIQKAQVSGQGDSLHEHIANLAGSPAIKKGILQTVKVVDELVKVMGRHKPENIVIEMARENQTTQKGQKNSRERMKRIEEGIKELGSQILKEHPVENTQLQNEKLYLYYLQNGRDMYVDQELDINRLSDYDVDAIVPQSFLKDDSIDNKVLTRSDKNRGKSDNVPSEEVVKKMKNYWRQLLNAKLITQRKFDNLTKAERGGLSELDKAGFIKRQLVETRQITKHVAQILDSRMNTKYDENDKLIREVKVITLKSKLVSDFRKDFQFYKVREINNYHHAHDAYLNAVVGTALIKKYPKLESEFVYGDYKVYDVRKMIAKSEQEIGKATAKYFFYSNIMNFFKTEITLANGEIRKRPLIETNGETGEIVWDKGRDFATVRKVLSMPQVNIVKKTEVQTGGFSKESILPKRNSDKLIARKKDWDPKKYGGFDSPTVAYSVLVVAKVEKGKSKKLKSVKELLGITIMERSSFEKNPIDFLEAKGYKEVKKDLIIKLPKYSLFELENGRKRMLASAGELQKGNELALPSKYVNFLYLASHYEKLKGSPEDNEQKQLFVEQHKHYLDEIIEQISEFSKRVILADANLDKVLSAYNKHRDKPIREQAENIIHLFTLTNLGAPAAFKYFDTTIDRKRYTSTKEVLDATLIHQSITGLYETRIDLSQLGGD

SEQ ID NO: 5786 - protein, 1367 aa, synthetic construct
  REGION 1..1367: note = Description of Artificial Sequence: Synthetic polypeptide
DKKYSIGLDIGTNSVGWAVITDEYKVPSKKFKVLGNTDRHSIKKNLIGALLFDSGETAEATRLKRTARRRYTRRKNRICYLQEIFSNEMAKVDDSFFHRLEESFLVEEDKKHERHPIFGNIVDEVAYHEKYPTIYHLRKKLVDSTDKADLRLIYLALAHMIKFRGHFLIEGDLNPDNSDVDKLFIQLVQTYNQLFEENPINASGVDAKAILSARLSKSRRLENLIAQLPGEKKNGLFGNLIALSLGLTPNFKSNFDLAEDAKLQLSKDTYDDDLDNLLAQIGDQYADLFLAAKNLSDAILLSDILRVNTEITKAPLSASMIKRYDEHHQDLTLLKALVRQQLPEKYKEIFFDQSKNGYAGYIDGGASQEEFYKFIKPILEKMDGTEELLVKLNREDLLRKQRTFDNGSIPHQIHLGELHAILRRQEDFYPFLKDNREKIEKILTFRIPYYVGPLARGNSRFAWMTRKSEETITPWNFEEVVDKGASAQSFIERMTNFDKNLPNEKVLPKHSLLYEYFTVYNELTKVKYVTEGMRKPAFLSGEQKKAIVDLLFKTNRKVTVKQLKEDYFKKIECFDSVEISGVEDRFNASLGTYHDLLKIIKDKDFLDNEENEDILEDIVLTLTLFEDREMIEERLKTYAHLFDDKVMKQLKRRRYTGWGRLSRKLINGIRDKQSGKTILDFLKSDGFANRNFMQLIHDDSLTFKEDIQKAQVSGQGDSLHEHIANLAGSPAIKKGILQTVKVVDELVKVMGRHKPENIVIEMARENQTTQKGQKNSRERMKRIEEGIKELGSQILKEHPVENTQLQNEKLYLYYLQNGRDMYVDQELDINRLSDYDVDAIVPQSFLKDDSIDNKVLTRSDKNRGKSDNVPSEEVVKKMKNYWRQLLNAKLITQRKFDNLTKAERGGLSELDKAGFIKRQLVETRQITKHVAQILDSRMNTKYDENDKLIREVKVITLKSKLVSDFRKDFQFYKVREINNYHHAHDAYLNAVVGTALIKKYPKLESEFVYGDYKVYDVRKMIAKSEQEIGKATAKYFFYSNIMNFFKTEITLANGEIRKRPLIETNGETGEIVWDKGRDFATVRKVLSMPQVNIVKKTEVQTGGFSKESILPKRNSDKLIARKKDWDPKKYGGFDSPTVAYSVLVVAKVEKGKSKKLKSVKELLGITIMERSSFEKNPIDFLEAKGYKEVKKDLIIKLPKYSLFELENGRKRMLASAGELQKGNELALPSKYVNFLYLASHYEKLKGSPEDNEQKQLFVEQHKHYLDEIIEQISEFSKRVILADANLDKVLSAYNKHRDKPIREQAENIIHLFTLTNLGAPAAFKYFDTTIDRKRYTSTKEVLDATLIHQSITGLYETRIDLSQLGGD

SEQ ID NO: 5787 - protein, 1368 aa, synthetic construct
  REGION 1..1368: note = Description of Artificial Sequence: Synthetic polypeptide
MDKKYSIGLDIGTNSVGWAVITDEYKVPSKKFKVLGNTDRHSIKKNLIGALLFDSGETAEATRLKRTARRRYTRRKNRICYLQEIFSNEMAKVDDSFFHRLEESFLVEEDKKHERHPIFGNIVDEVAYHEKYPTIYHLRKKLVDSTDKADLRLIYLALAHMIKFRGHFLIEGDLNPDNSDVDKLFIQLVQTYNQLFEENPINASGVDAKAILSARLSKSRRLENLIAQLPGEKKNGLFGNLIALSLGLTPNFKSNFDLAEDAKLQLSKDTYDDDLDNLLAQIGDQYADLFLAAKNLSDAILLSDILRVNTEITKAPLSASMIKRYDEHHQDLTLLKALVRQQLPEKYKEIFFDQSKNGYAGYIDGGASQEEFYKFIKPILEKMDGTEELLVKLNREDLLRKQRTFDNGSIPHQIHLGELHAILRRQEDFYPFLKDNREKIEKILTFRIPYYVGPLARGNSRFAWMTRKSEETITPWNFEEVVDKGASAQSFIERMTNFDKNLPNEKVLPKHSLLYEYFTVYNELTKVKYVTEGMRKPAFLSGEQKKAIVDLLFKTNRKVTVKQLKEDYFKKIECFDSVEISGVEDRFNASLGTYHDLLKIIKDKDFLDNEENEDILEDIVLTLTLFEDREMIEERLKTYAHLFDDKVMKQLKRRRYTGWGRLSRKLINGIRDKQSGKTILDFLKSDGFANRNFMQLIHDDSLTFKEDIQKAQVSGQGDSLHEHIANLAGSPAIKKGILQTVKVVDELVKVMGRHKPENIVIEMARENQTTQKGQKNSRERMKRIEEGIKELGSQILKEHPVENTQLQNEKLYLYYLQNGRDMYVDQELDINRLSDYDVDHIVPQSFLKDDSIDNKVLTRSDKNRGKSDNVPSEEVVKKMKNYWRQLLNAKLITQRKFDNLTKAERGGLSELDKAGFIKRQLVETRQITKHVAQILDSRMNTKYDENDKLIREVKVITLKSKLVSDFRKDFQFYKVREINNYHHAHDAYLNAVVGTALIKKYPKLESEFVYGDYKVYDVRKMIAKSEQEIGKATAKYFFYSNIMNFFKTEITLANGEIRKRPLIETNGETGEIVWDKGRDFATVRKVLSMPQVNIVKKTEVQTGGFSKESIRPKRNSDKLIARKKDWDPKKYGGFVSPTVAYSVLVVAKVEKGKSKKLKSVKELLGITIMERSSFEKNPIDFLEAKGYKEVKKDLIIKLPKYSLFELENGRKRMLASARFLQKGNELALPSKYVNFLYLASHYEKLKGSPEDNEQKQLFVEQHKHYLDEIIEQISEFSKRVILADANLDKVLSAYNKHRDKPIREQAENIIHLFTLTNLGAPRAFKYFDTTIDRKVYRSTKEVLDATLIHQSITGLYETRIDLSQLGGD

SEQ ID NO: 5788 - protein, 1367 aa, synthetic construct
  REGION 1..1367: note = Description of Artificial Sequence: Synthetic polypeptide
DKKYSIGLDIGTNSVGWAVITDEYKVPSKKFKVLGNTDRHSIKKNLIGALLFDSGETAEATRLKRTARRRYTRRKNRICYLQEIFSNEMAKVDDSFFHRLEESFLVEEDKKHERHPIFGNIVDEVAYHEKYPTIYHLRKKLVDSTDKADLRLIYLALAHMIKFRGHFLIEGDLNPDNSDVDKLFIQLVQTYNQLFEENPINASGVDAKAILSARLSKSRRLENLIAQLPGEKKNGLFGNLIALSLGLTPNFKSNFDLAEDAKLQLSKDTYDDDLDNLLAQIGDQYADLFLAAKNLSDAILLSDILRVNTEITKAPLSASMIKRYDEHHQDLTLLKALVRQQLPEKYKEIFFDQSKNGYAGYIDGGASQEEFYKFIKPILEKMDGTEELLVKLNREDLLRKQRTFDNGSIPHQIHLGELHAILRRQEDFYPFLKDNREKIEKILTFRIPYYVGPLARGNSRFAWMTRKSEETITPWNFEEVVDKGASAQSFIERMTNFDKNLPNEKVLPKHSLLYEYFTVYNELTKVKYVTEGMRKPAFLSGEQKKAIVDLLFKTNRKVTVKQLKEDYFKKIECFDSVEISGVEDRFNASLGTYHDLLKIIKDKDFLDNEENEDILEDIVLTLTLFEDREMIEERLKTYAHLFDDKVMKQLKRRRYTGWGRLSRKLINGIRDKQSGKTILDFLKSDGFANRNFMQLIHDDSLTFKEDIQKAQVSGQGDSLHEHIANLAGSPAIKKGILQTVKVVDELVKVMGRHKPENIVIEMARENQTTQKGQKNSRERMKRIEEGIKELGSQILKEHPVENTQLQNEKLYLYYLQNGRDMYVDQELDINRLSDYDVDHIVPQSFLKDDSIDNKVLTRSDKNRGKSDNVPSEEVVKKMKNYWRQLLNAKLITQRKFDNLTKAERGGLSELDKAGFIKRQLVETRQITKHVAQILDSRMNTKYDENDKLIREVKVITLKSKLVSDFRKDFQFYKVREINNYHHAHDAYLNAVVGTALIKKYPKLESEFVYGDYKVYDVRKMIAKSEQEIGKATAKYFFYSNIMNFFKTEITLANGEIRKRPLIETNGETGEIVWDKGRDFATVRKVLSMPQVNIVKKTEVQTGGFSKESIRPKRNSDKLIARKKDWDPKKYGGFVSPTVAYSVLVVAKVEKGKSKKLKSVKELLGITIMERSSFEKNPIDFLEAKGYKEVKKDLIIKLPKYSLFELENGRKRMLASARFLQKGNELALPSKYVNFLYLASHYEKLKGSPEDNEQKQLFVEQHKHYLDEIIEQISEFSKRVILADANLDKVLSAYNKHRDKPIREQAENIIHLFTLTNLGAPRAFKYFDTTIDRKVYRSTKEVLDATLIHQSITGLYETRIDLSQLGGD

SEQ ID NO: 5789 - protein, 1368 aa, synthetic construct
  REGION 1..1368: note = Description of Artificial Sequence: Synthetic polypeptide
MDKKYSIGLDIGTNSVGWAVITDEYKVPSKKFKVLGNTDRHSIKKNLIGALLFDSGETAEATRLKRTARRRYTRRKNRICYLQEIFSNEMAKVDDSFFHRLEESFLVEEDKKHERHPIFGNIVDEVAYHEKYPTIYHLRKKLVDSTDKADLRLIYLALAHMIKFRGHFLIEGDLNPDNSDVDKLFIQLVQTYNQLFEENPINASGVDAKAILSARLSKSRRLENLIAQLPGEKKNGLFGNLIALSLGLTPNFKSNFDLAEDAKLQLSKDTYDDDLDNLLAQIGDQYADLFLAAKNLSDAILLSDILRVNTEITKAPLSASMIKRYDEHHQDLTLLKALVRQQLPEKYKEIFFDQSKNGYAGYIDGGASQEEFYKFIKPILEKMDGTEELLVKLNREDLLRKQRTFDNGSIPHQIHLGELHAILRRQEDFYPFLKDNREKIEKILTFRIPYYVGPLARGNSRFAWMTRKSEETITPWNFEEVVDKGASAQSFIERMTNFDKNLPNEKVLPKHSLLYEYFTVYNELTKVKYVTEGMRKPAFLSGEQKKAIVDLLFKTNRKVTVKQLKEDYFKKIECFDSVEISGVEDRFNASLGTYHDLLKIIKDKDFLDNEENEDILEDIVLTLTLFEDREMIEERLKTYAHLFDDKVMKQLKRRRYTGWGRLSRKLINGIRDKQSGKTILDFLKSDGFANRNFMQLIHDDSLTFKEDIQKAQVSGQGDSLHEHIANLAGSPAIKKGILQTVKVVDELVKVMGRHKPENIVIEMARENQTTQKGQKNSRERMKRIEEGIKELGSQILKEHPVENTQLQNEKLYLYYLQNGRDMYVDQELDINRLSDYDVDAIVPQSFLKDDSIDNKVLTRSDKNRGKSDNVPSEEVVKKMKNYWRQLLNAKLITQRKFDNLTKAERGGLSELDKAGFIKRQLVETRQITKHVAQILDSRMNTKYDENDKLIREVKVITLKSKLVSDFRKDFQFYKVREINNYHHAHDAYLNAVVGTALIKKYPKLESEFVYGDYKVYDVRKMIAKSEQEIGKATAKYFFYSNIMNFFKTEITLANGEIRKRPLIETNGETGEIVWDKGRDFATVRKVLSMPQVNIVKKTEVQTGGFSKESIRPKRNSDKLIARKKDWDPKKYGGFVSPTVAYSVLVVAKVEKGKSKKLKSVKELLGITIMERSSFEKNPIDFLEAKGYKEVKKDLIIKLPKYSLFELENGRKRMLASARFLQKGNELALPSKYVNFLYLASHYEKLKGSPEDNEQKQLFVEQHKHYLDEIIEQISEFSKRVILADANLDKVLSAYNKHRDKPIREQAENIIHLFTLTNLGAPRAFKYFDTTIDRKVYRSTKEVLDATLIHQSITGLYETRIDLSQLGGD

SEQ ID NO: 5790 - protein, 1367 aa, synthetic construct
  REGION 1..1367: note = Description of Artificial Sequence: Synthetic polypeptide
DKKYSIGLDIGTNSVGWAVITDEYKVPSKKFKVLGNTDRHSIKKNLIGALLFDSGETAEATRLKRTARRRYTRRKNRICYLQEIFSNEMAKVDDSFFHRLEESFLVEEDKKHERHPIFGNIVDEVAYHEKYPTIYHLRKKLVDSTDKADLRLIYLALAHMIKFRGHFLIEGDLNPDNSDVDKLFIQLVQTYNQLFEENPINASGVDAKAILSARLSKSRRLENLIAQLPGEKKNGLFGNLIALSLGLTPNFKSNFDLAEDAKLQLSKDTYDDDLDNLLAQIGDQYADLFLAAKNLSDAILLSDILRVNTEITKAPLSASMIKRYDEHHQDLTLLKALVRQQLPEKYKEIFFDQSKNGYAGYIDGGASQEEFYKFIKPILEKMDGTEELLVKLNREDLLRKQRTFDNGSIPHQIHLGELHAILRRQEDFYPFLKDNREKIEKILTFRIPYYVGPLARGNSRFAWMTRKSEETITPWNFEEVVDKGASAQSFIERMTNFDKNLPNEKVLPKHSLLYEYFTVYNELTKVKYVTEGMRKPAFLSGEQKKAIVDLLFKTNRKVTVKQLKEDYFKKIECFDSVEISGVEDRFNASLGTYHDLLKIIKDKDFLDNEENEDILEDIVLTLTLFEDREMIEERLKTYAHLFDDKVMKQLKRRRYTGWGRLSRKLINGIRDKQSGKTILDFLKSDGFANRNFMQLIHDDSLTFKEDIQKAQVSGQGDSLHEHIANLAGSPAIKKGILQTVKVVDELVKVMGRHKPENIVIEMARENQTTQKGQKNSRERMKRIEEGIKELGSQILKEHPVENTQLQNEKLYLYYLQNGRDMYVDQELDINRLSDYDVDAIVPQSFLKDDSIDNKVLTRSDKNRGKSDNVPSEEVVKKMKNYWRQLLNAKLITQRKFDNLTKAERGGLSELDKAGFIKRQLVETRQITKHVAQILDSRMNTKYDENDKLIREVKVITLKSKLVSDFRKDFQFYKVREINNYHHAHDAYLNAVVGTALIKKYPKLESEFVYGDYKVYDVRKMIAKSEQEIGKATAKYFFYSNIMNFFKTEITLANGEIRKRPLIETNGETGEIVWDKGRDFATVRKVLSMPQVNIVKKTEVQTGGFSKESIRPKRNSDKLIARKKDWDPKKYGGFVSPTVAYSVLVVAKVEKGKSKKLKSVKELLGITIMERSSFEKNPIDFLEAKGYKEVKKDLIIKLPKYSLFELENGRKRMLASARFLQKGNELALPSKYVNFLYLASHYEKLKGSPEDNEQKQLFVEQHKHYLDEIIEQISEFSKRVILADANLDKVLSAYNKHRDKPIREQAENIIHLFTLTNLGAPRAFKYFDTTIDRKVYRSTKEVLDATLIHQSITGLYETRIDLSQLGGD

SEQ ID NO: 5791 - protein, 1368 aa, synthetic construct
  REGION 1..1368: note = Description of Artificial Sequence: Synthetic polypeptide
MDKKYSIGLDIGTNSVGWAVITDEYKVPSKKFKVLGNTDRHSIKKNLIGALLFDSGETAEATRLKRTARRRYTRRKNRICYLQEIFSNEMAKVDDSFFHRLEESFLVEEDKKHERHPIFGNIVDEVAYHEKYPTIYHLRKKLVDSTDKADLRLIYLALAHMIKFRGHFLIEGDLNPDNSDVDKLFIQLVQTYNQLFEENPINASGVDAKAILSARLSKSRRLENLIAQLPGEKKNGLFGNLIALSLGLTPNFKSNFDLAEDAKLQLSKDTYDDDLDNLLAQIGDQYADLFLAAKNLSDAILLSDILRVNTEITKAPLSASMIKRYDEHHQDLTLLKALVRQQLPEKYKEIFFDQSKNGYAGYIDGGASQEEFYKFIKPILEKMDGTEELLVKLNREDLLRKQRTFDNGSIPHQIHLGELHAILRRQEDFYPFLKDNREKIEKILTFRIPYYVGPLARGNSRFAWMTRKSEETITPWNFEEVVDKGASAQSFIERMTNFDKNLPNEKVLPKHSLLYEYFTVYNELTKVKYVTEGMRKPAFLSGEQKKAIVDLLFKTNRKVTVKQLKEDYFKKIECFDSVEISGVEDRFNASLGTYHDLLKIIKDKDFLDNEENEDILEDIVLTLTLFEDREMIEERLKTYAHLFDDKVMKQLKRRRYTGWGRLSRKLINGIRDKQSGKTILDFLKSDGFANRNFMQLIHDDSLTFKEDIQKAQVSGQGDSLHEHIANLAGSPAIKKGILQTVKVVDELVKVMGRHKPENIVIEMARENQTTQKGQKNSRERMKRIEEGIKELGSQILKEHPVENTQLQNEKLYLYYLQNGRDMYVDQELDINRLSDYDVDHIVPQSFLKDDSIDNKVLTRSDKNRGKSDNVPSEEVVKKMKNYWRQLLNAKLITQRKFDNLTKAERGGLSELDKAGFIKRQLVETRQITKHVAQILDSRMNTKYDENDKLIREVKVITLKSKLVSDFRKDFQFYKVREINNYHHAHDAYLNAVVGTALIKKYPKLESEFVYGDYKVYDVRKMIAKSEQEIGKATAKYFFYSNIMNFFKTEITLANGEIRKRPLIETNGETGEIVWDKGRDFATVRKVLSMPQVNIVKKTEVQTGGFSKESILPKRNSDKLIARKKDWDPKKYGGFVSPTVAYSVLVVAKVEKGKSKKLKSVKELLGITIMERSSFEKNPIDFLEAKGYKEVKKDLIIKLPKYSLFELENGRKRMLASARELQKGNELALPSKYVNFLYLASHYEKLKGSPEDNEQKQLFVEQHKHYLDEIIEQISEFSKRVILADANLDKVLSAYNKHRDKPIREQAENIIHLFTLTNLGAPAAFKYFDTTIDRKQYRSTKEVLDATLIHQSITGLYETRIDLSQLGGD

SEQ ID NO: 5792 - protein, 1367 aa, synthetic construct
  REGION 1..1367: note = Description of Artificial Sequence: Synthetic polypeptide
DKKYSIGLDIGTNSVGWAVITDEYKVPSKKFKVLGNTDRHSIKKNLIGALLFDSGETAEATRLKRTARRRYTRRKNRICYLQEIFSNEMAKVDDSFFHRLEESFLVEEDKKHERHPIFGNIVDEVAYHEKYPTIYHLRKKLVDSTDKADLRLIYLALAHMIKFRGHFLIEGDLNPDNSDVDKLFIQLVQTYNQLFEENPINASGVDAKAILSARLSKSRRLENLIAQLPGEKKNGLFGNLIALSLGLTPNFKSNFDLAEDAKLQLSKDTYDDDLDNLLAQIGDQYADLFLAAKNLSDAILLSDILRVNTEITKAPLSASMIKRYDEHHQDLTLLKALVRQQLPEKYKEIFFDQSKNGYAGYIDGGASQEEFYKFIKPILEKMDGTEELLVKLNREDLLRKQRTFDNGSIPHQIHLGELHAILRRQEDFYPFLKDNREKIEKILTFRIPYYVGPLARGNSRFAWMTRKSEETITPWNFEEVVDKGASAQSFIERMTNFDKNLPNEKVLPKHSLLYEYFTVYNELTKVKYVTEGMRKPAFLSGEQKKAIVDLLFKTNRKVTVKQLKEDYFKKIECFDSVEISGVEDRFNASLGTYHDLLKIIKDKDFLDNEENEDILEDIVLTLTLFEDREMIEERLKTYAHLFDDKVMKQLKRRRYTGWGRLSRKLINGIRDKQSGKTILDFLKSDGFANRNFMQLIHDDSLTFKEDIQKAQVSGQGDSLHEHIANLAGSPAIKKGILQTVKVVDELVKVMGRHKPENIVIEMARENQTTQKGQKNSRERMKRIEEGIKELGSQILKEHPVENTQLQNEKLYLYYLQNGRDMYVDQELDINRLSDYDVDHIVPQSFLKDDSIDNKVLTRSDKNRGKSDNVPSEEVVKKMKNYWRQLLNAKLITQRKFDNLTKAERGGLSELDKAGFIKRQLVETRQITKHVAQILDSRMNTKYDENDKLIREVKVITLKSKLVSDFRKDFQFYKVREINNYHHAHDAYLNAVVGTALIKKYPKLESEFVYGDYKVYDVRKMIAKSEQEIGKATAKYFFYSNIMNFFKTEITLANGEIRKRPLIETNGETGEIVWDKGRDFATVRKVLSMPQVNIVKKTEVQTGGFSKESILPKRNSDKLIARKKDWDPKKYGGFVSPTVAYSVLVVAKVEKGKSKKLKSVKELLGITIMERSSFEKNPIDFLEAKGYKEVKKDLIIKLPKYSLFELENGRKRMLASARELQKGNELALPSKYVNFLYLASHYEKLKGSPEDNEQKQLFVEQHKHYLDEIIEQISEFSKRVILADANLDKVLSAYNKHRDKPIREQAENIIHLFTLTNLGAPAAFKYFDTTIDRKQYRSTKEVLDATLIHQSITGLYETRIDLSQLGGD

SEQ ID NO: 5793 - protein, 1368 aa, synthetic construct
  REGION 1..1368: note = Description of Artificial Sequence: Synthetic polypeptide
MDKKYSIGLDIGTNSVGWAVITDEYKVPSKKFKVLGNTDRHSIKKNLIGALLFDSGETAEATRLKRTARRRYTRRKNRICYLQEIFSNEMAKVDDSFFHRLEESFLVEEDKKHERHPIFGNIVDEVAYHEKYPTIYHLRKKLVDSTDKADLRLIYLALAHMIKFRGHFLIEGDLNPDNSDVDKLFIQLVQTYNQLFEENPINASGVDAKAILSARLSKSRRLENLIAQLPGEKKNGLFGNLIALSLGLTPNFKSNFDLAEDAKLQLSKDTYDDDLDNLLAQIGDQYADLFLAAKNLSDAILLSDILRVNTEITKAPLSASMIKRYDEHHQDLTLLKALVRQQLPEKYKEIFFDQSKNGYAGYIDGGASQEEFYKFIKPILEKMDGTEELLVKLNREDLLRKQRTFDNGSIPHQIHLGELHAILRRQEDFYPFLKDNREKIEKILTFRIPYYVGPLARGNSRFAWMTRKSEETITPWNFEEVVDKGASAQSFIERMTNFDKNLPNEKVLPKHSLLYEYFTVYNELTKVKYVTEGMRKPAFLSGEQKKAIVDLLFKTNRKVTVKQLKEDYFKKIECFDSVEISGVEDRFNASLGTYHDLLKIIKDKDFLDNEENEDILEDIVLTLTLFEDREMIEERLKTYAHLFDDKVMKQLKRRRYTGWGRLSRKLINGIRDKQSGKTILDFLKSDGFANRNFMQLIHDDSLTFKEDIQKAQVSGQGDSLHEHIANLAGSPAIKKGILQTVKVVDELVKVMGRHKPENIVIEMARENQTTQKGQKNSRERMKRIEEGIKELGSQILKEHPVENTQLQNEKLYLYYLQNGRDMYVDQELDINRLSDYDVDAIVPQSFLKDDSIDNKVLTRSDKNRGKSDNVPSEEVVKKMKNYWRQLLNAKLITQRKFDNLTKAERGGLSELDKAGFIKRQLVETRQITKHVAQILDSRMNTKYDENDKLIREVKVITLKSKLVSDFRKDFQFYKVREINNYHHAHDAYLNAVVGTALIKKYPKLESEFVYGDYKVYDVRKMIAKSEQEIGKATAKYFFYSNIMNFFKTEITLANGEIRKRPLIETNGETGEIVWDKGRDFATVRKVLSMPQVNIVKKTEVQTGGFSKESILPKRNSDKLIARKKDWDPKKYGGFVSPTVAYSVLVVAKVEKGKSKKLKSVKELLGITIMERSSFEKNPIDFLEAKGYKEVKKDLIIKLPKYSLFELENGRKRMLASARELQKGNELALPSKYVNFLYLASHYEKLKGSPEDNEQKQLFVEQHKHYLDEIIEQISEFSKRVILADANLDKVLSAYNKHRDKPIREQAENIIHLFTLTNLGAPAAFKYFDTTIDRKQYRSTKEVLDATLIHQSITGLYETRIDLSQLGGD

SEQ ID NO: 5794 - protein, 1367 aa, synthetic construct
  REGION 1..1367: note = Description of Artificial Sequence: Synthetic polypeptide
DKKYSIGLDIGTNSVGWAVITDEYKVPSKKFKVLGNTDRHSIKKNLIGALLFDSGETAEATRLKRTARRRYTRRKNRICYLQEIFSNEMAKVDDSFFHRLEESFLVEEDKKHERHPIFGNIVDEVAYHEKYPTIYHLRKKLVDSTDKADLRLIYLALAHMIKFRGHFLIEGDLNPDNSDVDKLFIQLVQTYNQLFEENPINASGVDAKAILSARLSKSRRLENLIAQLPGEKKNGLFGNLIALSLGLTPNFKSNFDLAEDAKLQLSKDTYDDDLDNLLAQIGDQYADLFLAAKNLSDAILLSDILRVNTEITKAPLSASMIKRYDEHHQDLTLLKALVRQQLPEKYKEIFFDQSKNGYAGYIDGGASQEEFYKFIKPILEKMDGTEELLVKLNREDLLRKQRTFDNGSIPHQIHLGELHAILRRQEDFYPFLKDNREKIEKILTFRIPYYVGPLARGNSRFAWMTRKSEETITPWNFEEVVDKGASAQSFIERMTNFDKNLPNEKVLPKHSLLYEYFTVYNELTKVKYVTEGMRKPAFLSGEQKKAIVDLLFKTNRKVTVKQLKEDYFKKIECFDSVEISGVEDRFNASLGTYHDLLKIIKDKDFLDNEENEDILEDIVLTLTLFEDREMIEERLKTYAHLFDDKVMKQLKRRRYTGWGRLSRKLINGIRDKQSGKTILDFLKSDGFANRNFMQLIHDDSLTFKEDIQKAQVSGQGDSLHEHIANLAGSPAIKKGILQTVKVVDELVKVMGRHKPENIVIEMARENQTTQKGQKNSRERMKRIEEGIKELGSQILKEHPVENTQLQNEKLYLYYLQNGRDMYVDQELDINRLSDYDVDAIVPQSFLKDDSIDNKVLTRSDKNRGKSDNVPSEEVVKKMKNYWRQLLNAKLITQRKFDNLTKAERGGLSELDKAGFIKRQLVETRQITKHVAQILDSRMNTKYDENDKLIREVKVITLKSKLVSDFRKDFQFYKVREINNYHHAHDAYLNAVVGTALIKKYPKLESEFVYGDYKVYDVRKMIAKSEQEIGKATAKYFFYSNIMNFFKTEITLANGEIRKRPLIETNGETGEIVWDKGRDFATVRKVLSMPQVNIVKKTEVQTGGFSKESILPKRNSDKLIARKKDWDPKKYGGFVSPTVAYSVLVVAKVEKGKSKKLKSVKELLGITIMERSSFEKNPIDFLEAKGYKEVKKDLIIKLPKYSLFELENGRKRMLASARELQKGNELALPSKYVNFLYLASHYEKLKGSPEDNEQKQLFVEQHKHYLDEIIEQISEFSKRVILADANLDKVLSAYNKHRDKPIREQAENIIHLFTLTNLGAPAAFKYFDTTIDRKQYRSTKEVLDATLIHQSITGLYETRIDLSQLGGD

SEQ ID NO: 5795 - protein, 1054 aa, Staphylococcus lugdunensis
MNQKFILGLDIGITSVGYGLIDYETKNIIDAGVRLFPEANVENNEGRRSKRGSRRLKRRRIHRLERVKKLLEDYNLLDQSQIPQSTNPYAIRVKGLSEALSKDELVIALLHIAKRRGIHKIDVIDSNDDVGNELSTKEQLNKNSKLLKDKFVCQIQLERMNEGQVRGEKNRFKTADIIKEIIQLLNVQKNFHQLDENFINKYIELVEMRREYFEGPGKGSPYGWEGDPKAWYETLMGHCTYFPDELRSVKYAYSADLFNALNDLNNLVIQRDGLSKLEYHEKYHIIENVFKQKKKPTLKQIANEINVNPEDIKGYRITKSGKPQFTEFKLYHDLKSVLFDQSILENEDVLDQIAEILTIYQDKDSIKSKLTELDILLNEEDKENIAQLTGYTGTHRLSLKCIRLVLEEQWYSSRNQMEIFTHLNIKPKKINLTAANKIPKAMIDEFILSPVVKRTFGQAINLINKIIEKYGVPEDIIIELARENNSKDKQKFINEMQKKNENTRKRINEIIGKYGNQNAKRLVEKIRLHDEQEGKCLYSLESIPLEDLLNNPNHYEVDHIIPRSVSFDNSYHNKVLVKQSENSKKSNLTPYQYFNSGKSKLSYNQFKQHILNLSKSQDRISKKKKEYLLEERDINKFEVQKEFINRNLVDTRYATRELTNYLKAYFSANNMNVKVKTINGSFTDYLRKVWKFKKERNHGYKHHAEDALIIANADFLFKENKKLKAVNSVLEKPEIESKQLDIQVDSEDNYSEMFIIPKQVQDIKDFRNFKYSHRVDKKPNRQLINDTLYSTRKKDNSTYIVQTIKDIYAKDNTTLKKQFDKSPEKFLMYQHDPRTFEKLEVIMKQYANEKNPLAKYHEETGEYLTKYSKKNNGPIVKSLKYIGNKLGSHLDVTHQFKSSTKKLVKLSIKPYRFDVYLTDKGYKFITISYLDVLKKDNYYYIPEQKYDKLKLGKAIDKNAKFIASFYKNDLIKLDGEIYKIIGVNSDTRNMIELDLPDIRYKEYCELNNIKGEPRIKKTIGKKVNSIEKLTTDVLGNVFTNTQYTKPQLLFKRGN

SEQ ID NO: 5796 - protein, 1053 aa, Staphylococcus lugdunensis
NQKFILGLDIGITSVGYGLIDYETKNIIDAGVRLFPEANVENNEGRRSKRGSRRLKRRRIHRLERVKKLLEDYNLLDQSQIPQSTNPYAIRVKGLSEALSKDELVIALLHIAKRRGIHKIDVIDSNDDVGNELSTKEQLNKNSKLLKDKFVCQIQLERMNEGQVRGEKNRFKTADIIKEIIQLLNVQKNFHQLDENFINKYIELVEMRREYFEGPGKGSPYGWEGDPKAWYETLMGHCTYFPDELRSVKYAYSADLFNALNDLNNLVIQRDGLSKLEYHEKYHIIENVFKQKKKPTLKQIANEINVNPEDIKGYRITKSGKPQFTEFKLYHDLKSVLFDQSILENEDVLDQIAEILTIYQDKDSIKSKLTELDILLNEEDKENIAQLTGYTGTHRLSLKCIRLVLEEQWYSSRNQMEIFTHLNIKPKKINLTAANKIPKAMIDEFILSPVVKRTFGQAINLINKIIEKYGVPEDIIIELARENNSKDKQKFINEMQKKNENTRKRINEIIGKYGNQNAKRLVEKIRLHDEQEGKCLYSLESIPLEDLLNNPNHYEVDHIIPRSVSFDNSYHNKVLVKQSENSKKSNLTPYQYFNSGKSKLSYNQFKQHILNLSKSQDRISKKKKEYLLEERDINKFEVQKEFINRNLVDTRYATRELTNYLKAYFSANNMNVKVKTINGSFTDYLRKVWKFKKERNHGYKHHAEDALIIANADFLFKENKKLKAVNSVLEKPEIESKQLDIQVDSEDNYSEMFIIPKQVQDIKDFRNFKYSHRVDKKPNRQLINDTLYSTRKKDNSTYIVQTIKDIYAKDNTTLKKQFDKSPEKFLMYQHDPRTFEKLEVIMKQYANEKNPLAKYHEETGEYLTKYSKKNNGPIVKSLKYIGNKLGSHLDVTHQFKSSTKKLVKLSIKPYRFDVYLTDKGYKFITISYLDVLKKDNYYYIPEQKYDKLKLGKAIDKNAKFIASFYKNDLIKLDGEIYKIIGVNSDTRNMIELDLPDIRYKEYCELNNIKGEPRIKKTIGKKVNSIEKLTTDVLGNVFTNTQYTKPQLLFKRGN

SEQ ID NO: 5797 - protein, 1054 aa, synthetic construct
  REGION 1..1054: note = Description of Artificial Sequence: Synthetic polypeptide
MNQKFILGLDIGITSVGYGLIDYETKNIIDAGVRLFPEANVENNEGRRSKRGSRRLKRRRIHRLERVKKLLEDYNLLDQSQIPQSTNPYAIRVKGLSEALSKDELVIALLHIAKRRGIHKIDVIDSNDDVGNELSTKEQLNKNSKLLKDKFVCQIQLERMNEGQVRGEKNRFKTADIIKEIIQLLNVQKNFHQLDENFINKYIELVEMRREYFEGPGKGSPYGWEGDPKAWYETLMGHCTYFPDELRSVKYAYSADLFNALNDLNNLVIQRDGLSKLEYHEKYHIIENVFKQKKKPTLKQIANEINVNPEDIKGYRITKSGKPQFTEFKLYHDLKSVLFDQSILENEDVLDQIAEILTIYQDKDSIKSKLTELDILLNEEDKENIAQLTGYTGTHRLSLKCIRLVLEEQWYSSRNQMEIFTHLNIKPKKINLTAANKIPKAMIDEFILSPVVKRTFGQAINLINKIIEKYGVPEDIIIELARENNSKDKQKFINEMQKKNENTRKRINEIIGKYGNQNAKRLVEKIRLHDEQEGKCLYSLESIPLEDLLNNPNHYEVDHIIPRSVSFDNSYHNKVLVKQSEASKKSNLTPYQYFNSGKSKLSYNQFKQHILNLSKSQDRISKKKKEYLLEERDINKFEVQKEFINRNLVDTRYATRELTNYLKAYFSANNMNVKVKTINGSFTDYLRKVWKFKKERNHGYKHHAEDALIIANADFLFKENKKLKAVNSVLEKPEIESKQLDIQVDSEDNYSEMFIIPKQVQDIKDFRNFKYSHRVDKKPNRQLINDTLYSTRKKDNSTYIVQTIKDIYAKDNTTLKKQFDKSPEKFLMYQHDPRTFEKLEVIMKQYANEKNPLAKYHEETGEYLTKYSKKNNGPIVKSLKYIGNKLGSHLDVTHQFKSSTKKLVKLSIKPYRFDVYLTDKGYKFITISYLDVLKKDNYYYIPEQKYDKLKLGKAIDKNAKFIASFYKNDLIKLDGEIYKIIGVNSDTRNMIELDLPDIRYKEYCELNNIKGEPRIKKTIGKKVNSIEKLTTDVLGNVFTNTQYTKPQLLFKRGN

SEQ ID NO: 5798 - protein, 1053 aa, synthetic construct
  REGION 1..1053: note = Description of Artificial Sequence: Synthetic polypeptide
NQKFILGLDIGITSVGYGLIDYETKNIIDAGVRLFPEANVENNEGRRSKRGSRRLKRRRIHRLERVKKLLEDYNLLDQSQIPQSTNPYAIRVKGLSEALSKDELVIALLHIAKRRGIHKIDVIDSNDDVGNELSTKEQLNKNSKLLKDKFVCQIQLERMNEGQVRGEKNRFKTADIIKEIIQLLNVQKNFHQLDENFINKYIELVEMRREYFEGPGKGSPYGWEGDPKAWYETLMGHCTYFPDELRSVKYAYSADLFNALNDLNNLVIQRDGLSKLEYHEKYHIIENVFKQKKKPTLKQIANEINVNPEDIKGYRITKSGKPQFTEFKLYHDLKSVLFDQSILENEDVLDQIAEILTIYQDKDSIKSKLTELDILLNEEDKENIAQLTGYTGTHRLSLKCIRLVLEEQWYSSRNQMEIFTHLNIKPKKINLTAANKIPKAMIDEFILSPVVKRTFGQAINLINKIIEKYGVPEDIIIELARENNSKDKQKFINEMQKKNENTRKRINEIIGKYGNQNAKRLVEKIRLHDEQEGKCLYSLESIPLEDLLNNPNHYEVDHIIPRSVSFDNSYHNKVLVKQSEASKKSNLTPYQYFNSGKSKLSYNQFKQHILNLSKSQDRISKKKKEYLLEERDINKFEVQKEFINRNLVDTRYATRELTNYLKAYFSANNMNVKVKTINGSFTDYLRKVWKFKKERNHGYKHHAEDALIIANADFLFKENKKLKAVNSVLEKPEIESKQLDIQVDSEDNYSEMFIIPKQVQDIKDFRNFKYSHRVDKKPNRQLINDTLYSTRKKDNSTYIVQTIKDIYAKDNTTLKKQFDKSPEKFLMYQHDPRTFEKLEVIMKQYANEKNPLAKYHEETGEYLTKYSKKNNGPIVKSLKYIGNKLGSHLDVTHQFKSSTKKLVKLSIKPYRFDVYLTDKGYKFITISYLDVLKKDNYYYIPEQKYDKLKLGKAIDKNAKFIASFYKNDLIKLDGEIYKIIGVNSDTRNMIELDLPDIRYKEYCELNNIKGEPRIKKTIGKKVNSIEKLTTDVLGNVFTNTQYTKPQLLFKRGN

SEQ ID NO: 5799 - protein, 1053 aa, Staphylococcus aureus
MKRNYILGLDIGITSVGYGIIDYETRDVIDAGVRLFKEANVENNEGRRSKRGARRLKRRRRHRIQRVKKLLFDYNLLTDHSELSGINPYEARVKGLSQKLSEEEFSAALLHLAKRRGVHNVNEVEEDTGNELSTKEQISRNSKALEEKYVAELQLERLKKDGEVRGSINRFKTSDYVKEAKQLLKVQKAYHQLDQSFIDTYIDLLETRRTYYEGPGEGSPFGWKDIKEWYEMLMGHCTYFPEELRSVKYAYNADLYNALNDLNNLVITRDENEKLEYYEKFQIIENVFKQKKKPTLKQIAKEILVNEEDIKGYRVTSTGKPEFTNLKVYHDIKDITARKEIIENAELLDQIAKILTIYQSSEDIQEELTNLNSELTQEEIEQISNLKGYTGTHNLSLKAINLILDELWHTNDNQIAIFNRLKLVPKKVDLSQQKEIPTTLVDDFILSPVVKRSFIQSIKVINAIIKKYGLPNDIIIELAREKNSKDAQKMINEMQKRNRQTNERIEEIIRTTGKENAKYLIEKIKLHDMQEGKCLYSLEAIPLEDLLNNPFNYEVDHIIPRSVSFDNSFNNKVLVKQEENSKKGNRTPFQYLSSSDSKISYETFKKHILNLAKGKGRISKTKKEYLLEERDINRFSVQKDFINRNLVDTRYATRGLMNLLRSYFRVNNLDVKVKSINGGFTSFLRRKWKFKKERNKGYKHHAEDALIIANADFIFKEWKKLDKAKKVMENQMFEEKQAESMPEIETEQEYKEIFITPHQIKHIKDFKDYKYSHRVDKKPNRELINDTLYSTRKDDKGNTLIVNNLNGLYDKDNDKLKKLINKSPEKLLMYHHDPQTYQKLKLIMEQYGDEKNPLYKYYEETGNYLTKYSKKDNGPVIKKIKYYGNKLNAHLDITDDYPNSRNKVVKLSLKPYRFDVYLDNGVYKFVTVKNLDVIKKENYYEVNSKCYEEAKKLKKISNQAEFIASFYNNDLIKINGELYRVIGVNNDLLNRIEVNMIDITYREYLENMNDKRPPRIIKTIASKTQSIKKYSTDILGNLYEVKSKKHPQIIKKG

SEQ ID NO: 5800 - protein, 1052 aa, Staphylococcus aureus
KRNYILGLDIGITSVGYGIIDYETRDVIDAGVRLFKEANVENNEGRRSKRGARRLKRRRRHRIQRVKKLLFDYNLLTDHSELSGINPYEARVKGLSQKLSEEEFSAALLHLAKRRGVHNVNEVEEDTGNELSTKEQISRNSKALEEKYVAELQLERLKKDGEVRGSINRFKTSDYVKEAKQLLKVQKAYHQLDQSFIDTYIDLLETRRTYYEGPGEGSPFGWKDIKEWYEMLMGHCTYFPEELRSVKYAYNADLYNALNDLNNLVITRDENEKLEYYEKFQIIENVFKQKKKPTLKQIAKEILVNEEDIKGYRVTSTGKPEFTNLKVYHDIKDITARKEIIENAELLDQIAKILTIYQSSEDIQEELTNLNSELTQEEIEQISNLKGYTGTHNLSLKAINLILDELWHTNDNQIAIFNRLKLVPKKVDLSQQKEIPTTLVDDFILSPVVKRSFIQSIKVINAIIKKYGLPNDIIIELAREKNSKDAQKMINEMQKRNRQTNERIEEIIRTTGKENAKYLIEKIKLHDMQEGKCLYSLEAIPLEDLLNNPFNYEVDHIIPRSVSFDNSFNNKVLVKQEENSKKGNRTPFQYLSSSDSKISYETFKKHILNLAKGKGRISKTKKEYLLEERDINRFSVQKDFINRNLVDTRYATRGLMNLLRSYFRVNNLDVKVKSINGGFTSFLRRKWKFKKERNKGYKHHAEDALIIANADFIFKEWKKLDKAKKVMENQMFEEKQAESMPEIETEQEYKEIFITPHQIKHIKDFKDYKYSHRVDKKPNRELINDTLYSTRKDDKGNTLIVNNLNGLYDKDNDKLKKLINKSPEKLLMYHHDPQTYQKLKLIMEQYGDEKNPLYKYYEETGNYLTKYSKKDNGPVIKKIKYYGNKLNAHLDITDDYPNSRNKVVKLSLKPYRFDVYLDNGVYKFVTVKNLDVIKKENYYEVNSKCYEEAKKLKKISNQAEFIASFYNNDLIKINGELYRVIGVNNDLLNRIEVNMIDITYREYLENMNDKRPPRIIKTIASKTQSIKKYSTDILGNLYEVKSKKHPQIIKKG

SEQ ID NO: 5801 - skipped

SEQ ID NO: 5802 - protein, 1053 aa, synthetic construct
  REGION 1..1053: note = Description of Artificial Sequence: Synthetic polypeptide
MKRNYILGLDIGITSVGYGIIDYETRDVIDAGVRLFKEANVENNEGRRSKRGARRLKRRRRHRIQRVKKLLFDYNLLTDHSELSGINPYEARVKGLSQKLSEEEFSAALLHLAKRRGVHNVNEVEEDTGNELSTKEQISRNSKALEEKYVAELQLERLKKDGEVRGSINRFKTSDYVKEAKQLLKVQKAYHQLDQSFIDTYIDLLETRRTYYEGPGEGSPFGWKDIKEWYEMLMGHCTYFPEELRSVKYAYNADLYNALNDLNNLVITRDENEKLEYYEKFQIIENVFKQKKKPTLKQIAKEILVNEEDIKGYRVTSTGKPEFTNLKVYHDIKDITARKEIIENAELLDQIAKILTIYQSSEDIQEELTNLNSELTQEEIEQISNLKGYTGTHNLSLKAINLILDELWHTNDNQIAIFNRLKLVPKKVDLSQQKEIPTTLVDDFILSPVVKRSFIQSIKVINAIIKKYGLPNDIIIELAREKNSKDAQKMINEMQKRNRQTNERIEEIIRTTGKENAKYLIEKIKLHDMQEGKCLYSLEAIPLEDLLNNPFNYEVDHIIPRSVSFDNSFNNKVLVKQEEASKKGNRTPFQYLSSSDSKISYETFKKHILNLAKGKGRISKTKKEYLLEERDINRFSVQKDFINRNLVDTRYATRGLMNLLRSYFRVNNLDVKVKSINGGFTSFLRRKWKFKKERNKGYKHHAEDALIIANADFIFKEWKKLDKAKKVMENQMFEEKQAESMPEIETEQEYKEIFITPHQIKHIKDFKDYKYSHRVDKKPNRELINDTLYSTRKDDKGNTLIVNNLNGLYDKDNDKLKKLINKSPEKLLMYHHDPQTYQKLKLIMEQYGDEKNPLYKYYEETGNYLTKYSKKDNGPVIKKIKYYGNKLNAHLDITDDYPNSRNKVVKLSLKPYRFDVYLDNGVYKFVTVKNLDVIKKENYYEVNSKCYEEAKKLKKISNQAEFIASFYNNDLIKINGELYRVIGVNNDLLNRIEVNMIDITYREYLENMNDKRPPRIIKTIASKTQSIKKYSTDILGNLYEVKSKKHPQIIKKG

SEQ ID NO: 5803 - protein, 1052 aa, synthetic construct
  REGION 1..1052: note = Description of Artificial Sequence: Synthetic polypeptide
KRNYILGLDIGITSVGYGIIDYETRDVIDAGVRLFKEANVENNEGRRSKRGARRLKRRRRHRIQRVKKLLFDYNLLTDHSELSGINPYEARVKGLSQKLSEEEFSAALLHLAKRRGVHNVNEVEEDTGNELSTKEQISRNSKALEEKYVAELQLERLKKDGEVRGSINRFKTSDYVKEAKQLLKVQKAYHQLDQSFIDTYIDLLETRRTYYEGPGEGSPFGWKDIKEWYEMLMGHCTYFPEELRSVKYAYNADLYNALNDLNNLVITRDENEKLEYYEKFQIIENVFKQKKKPTLKQIAKEILVNEEDIKGYRVTSTGKPEFTNLKVYHDIKDITARKEIIENAELLDQIAKILTIYQSSEDIQEELTNLNSELTQEEIEQISNLKGYTGTHNLSLKAINLILDELWHTNDNQIAIFNRLKLVPKKVDLSQQKEIPTTLVDDFILSPVVKRSFIQSIKVINAIIKKYGLPNDIIIELAREKNSKDAQKMINEMQKRNRQTNERIEEIIRTTGKENAKYLIEKIKLHDMQEGKCLYSLEAIPLEDLLNNPFNYEVDHIIPRSVSFDNSFNNKVLVKQEEASKKGNRTPFQYLSSSDSKISYETFKKHILNLAKGKGRISKTKKEYLLEERDINRFSVQKDFINRNLVDTRYATRGLMNLLRSYFRVNNLDVKVKSINGGFTSFLRRKWKFKKERNKGYKHHAEDALIIANADFIFKEWKKLDKAKKVMENQMFEEKQAESMPEIETEQEYKEIFITPHQIKHIKDFKDYKYSHRVDKKPNRELINDTLYSTRKDDKGNTLIVNNLNGLYDKDNDKLKKLINKSPEKLLMYHHDPQTYQKLKLIMEQYGDEKNPLYKYYEETGNYLTKYSKKDNGPVIKKIKYYGNKLNAHLDITDDYPNSRNKVVKLSLKPYRFDVYLDNGVYKFVTVKNLDVIKKENYYEVNSKCYEEAKKLKKISNQAEFIASFYNNDLIKINGELYRVIGVNNDLLNRIEVNMIDITYREYLENMNDKRPPRIIKTIASKTQSIKKYSTDILGNLYEVKSKKHPQIIKKG

SEQ ID NO: 5804 - protein, 1368 aa, synthetic construct
  REGION 1..1368: note = Description of Artificial Sequence: Synthetic polypeptide
MDKKYSIGLDIGTNSVGWAVITDEYKVPSKKFKVLGNTDRHSIKKNLIGALLFDSGETAERTRLKRTARRRYTRRKNRICYLQEIFSNEMAKVDDSFFHRLEESFLVEEDKKHERHPIFGNIVDEVAYHEKYPTIYHLRKKLVDSTDKADLRLIYLALAHMIKFRGHFLIEGDLNPDNSDVDKLFIQLVQTYNQLFEENPINASGVDAKAILSARLSKSRRLENLIAQLPGEKKNGLFGNLIALSLGLTPNFKSNFDLAEDAKLQLSKDTYDDDLDNLLAQIGDQYADLFLAAKNLSDAILLSDILRVNTEITKAPLSASMIKRYDEHHQDLTLLKALVRQQLPEKYKEIFFDQSKNGYAGYIDGGASQEEFYKFIKPILEKMDGTEELLVKLNREDLLRKQRTFDNGSIPHQIHLGELHAILRRQEDFYPFLKDNREKIEKILTFRIPYYVGPLARGNSRFAWMTRKSEETITPWNFEEVVDKGASAQSFIERMTNFDKNLPNEKVLPKHSLLYEYFTVYNELTKVKYVTEGMRKPAFLSGEQKKAIVDLLFKTNRKVTVKQLKEDYFKKIECFDSVEISGVEDRFNASLGTYHDLLKIIKDKDFLDNEENEDILEDIVLTLTLFEDREMIEERLKTYAHLFDDKVMKQLKRRRYTGWGRLSRKLINGIRDKQSGKTILDFLKSDGFANRNFMQLIHDDSLTFKEDIQKAQVSGQGDSLHEHIANLAGSPAIKKGILQTVKVVDELVKVMGRHKPENIVIEMARENQTTQKGQKNSRERMKRIEEGIKELGSQILKEHPVENTQLQNEKLYLYYLQNGRDMYVDQELDINRLSDYDVDHIVPQSFLKDDSIDNKVLTRSDKNRGKSDNVPSEEVVKKMKNYWRQLLNAKLITQRKFDNLTKAERGGLSELDKAGFIKRQLVETRQITKHVAQILDSRMNTKYDENDKLIREVKVITLKSKLVSDFRKDFQFYKVREINNYHHAHDAYLNAVVGTALIKKYPKLESEFVYGDYKVYDVRKMIAKSEQEIGKATAKYFFYSNIMNFFKTEITLANGEIRKRPLIETNGETGEIVWDKGRDFATVRKVLSMPQVNIVKKTEVQTGGFSKESIRPKRNSDKLIARKKDWDPKKYGGFLWPTVAYSVLVVAKVEKGKSKKLKSVKELLGITIMERSSFEKNPIDFLEAKGYKEVKKDLIIKLPKYSLFELENGRKRMLASAKQLQKGNELALPSKYVNFLYLASHYEKLKGSPEDNEQKQLFVEQHKHYLDEIIEQISEFSKRVILADANLDKVLSAYNKHRDKPIREQAENIIHLFTLTRLGAPRAFKYFDTTIDPKQYRSTKEVLDATLIHQSITGLYETRIDLSQLGGD

SEQ ID NO: 5805 - protein, 1367 aa, synthetic construct
  REGION 1..1367: note = Description of Artificial Sequence: Synthetic polypeptide
DKKYSIGLDIGTNSVGWAVITDEYKVPSKKFKVLGNTDRHSIKKNLIGALLFDSGETAERTRLKRTARRRYTRRKNRICYLQEIFSNEMAKVDDSFFHRLEESFLVEEDKKHERHPIFGNIVDEVAYHEKYPTIYHLRKKLVDSTDKADLRLIYLALAHMIKFRGHFLIEGDLNPDNSDVDKLFIQLVQTYNQLFEENPINASGVDAKAILSARLSKSRRLENLIAQLPGEKKNGLFGNLIALSLGLTPNFKSNFDLAEDAKLQLSKDTYDDDLDNLLAQIGDQYADLFLAAKNLSDAILLSDILRVNTEITKAPLSASMIKRYDEHHQDLTLLKALVRQQLPEKYKEIFFDQSKNGYAGYIDGGASQEEFYKFIKPILEKMDGTEELLVKLNREDLLRKQRTFDNGSIPHQIHLGELHAILRRQEDFYPFLKDNREKIEKILTFRIPYYVGPLARGNSRFAWMTRKSEETITPWNFEEVVDKGASAQSFIERMTNFDKNLPNEKVLPKHSLLYEYFTVYNELTKVKYVTEGMRKPAFLSGEQKKAIVDLLFKTNRKVTVKQLKEDYFKKIECFDSVEISGVEDRFNASLGTYHDLLKIIKDKDFLDNEENEDILEDIVLTLTLFEDREMIEERLKTYAHLFDDKVMKQLKRRRYTGWGRLSRKLINGIRDKQSGKTILDFLKSDGFANRNFMQLIHDDSLTFKEDIQKAQVSGQGDSLHEHIANLAGSPAIKKGILQTVKVVDELVKVMGRHKPENIVIEMARENQTTQKGQKNSRERMKRIEEGIKELGSQILKEHPVENTQLQNEKLYLYYLQNGRDMYVDQELDINRLSDYDVDHIVPQSFLKDDSIDNKVLTRSDKNRGKSDNVPSEEVVKKMKNYWRQLLNAKLITQRKFDNLTKAERGGLSELDKAGFIKRQLVETRQITKHVAQILDSRMNTKYDENDKLIREVKVITLKSKLVSDFRKDFQFYKVREINNYHHAHDAYLNAVVGTALIKKYPKLESEFVYGDYKVYDVRKMIAKSEQEIGKATAKYFFYSNIMNFFKTEITLANGEIRKRPLIETNGETGEIVWDKGRDFATVRKVLSMPQVNIVKKTEVQTGGFSKESIRPKRNSDKLIARKKDWDPKKYGGFLWPTVAYSVLVVAKVEKGKSKKLKSVKELLGITIMERSSFEKNPIDFLEAKGYKEVKKDLIIKLPKYSLFELENGRKRMLASAKQLQKGNELALPSKYVNFLYLASHYEKLKGSPEDNEQKQLFVEQHKHYLDEIIEQISEFSKRVILADANLDKVLSAYNKHRDKPIREQAENIIHLFTLTRLGAPRAFKYFDTTIDPKQYRSTKEVLDATLIHQSITGLYETRIDLSQLGGD

SEQ ID NO: 5806 - protein, 1368 aa, synthetic construct
  REGION 1..1368: note = Description of Artificial Sequence: Synthetic polypeptide
MDKKYSIGLDIGTNSVGWAVITDEYKVPSKKFKVLGNTDRHSIKKNLIGALLFDSGETAERTRLKRTARRRYTRRKNRICYLQEIFSNEMAKVDDSFFHRLEESFLVEEDKKHERHPIFGNIVDEVAYHEKYPTIYHLRKKLVDSTDKADLRLIYLALAHMIKFRGHFLIEGDLNPDNSDVDKLFIQLVQTYNQLFEENPINASGVDAKAILSARLSKSRRLENLIAQLPGEKKNGLFGNLIALSLGLTPNFKSNFDLAEDAKLQLSKDTYDDDLDNLLAQIGDQYADLFLAAKNLSDAILLSDILRVNTEITKAPLSASMIKRYDEHHQDLTLLKALVRQQLPEKYKEIFFDQSKNGYAGYIDGGASQEEFYKFIKPILEKMDGTEELLVKLNREDLLRKQRTFDNGSIPHQIHLGELHAILRRQEDFYPFLKDNREKIEKILTFRIPYYVGPLARGNSRFAWMTRKSEETITPWNFEEVVDKGASAQSFIERMTNFDKNLPNEKVLPKHSLLYEYFTVYNELTKVKYVTEGMRKPAFLSGEQKKAIVDLLFKTNRKVTVKQLKEDYFKKIECFDSVEISGVEDRFNASLGTYHDLLKIIKDKDFLDNEENEDILEDIVLTLTLFEDREMIEERLKTYAHLFDDKVMKQLKRRRYTGWGRLSRKLINGIRDKQSGKTILDFLKSDGFANRNFMQLIHDDSLTFKEDIQKAQVSGQGDSLHEHIANLAGSPAIKKGILQTVKVVDELVKVMGRHKPENIVIEMARENQTTQKGQKNSRERMKRIEEGIKELGSQILKEHPVENTQLQNEKLYLYYLQNGRDMYVDQELDINRLSDYDVDAIVPQSFLKDDSIDNKVLTRSDKNRGKSDNVPSEEVVKKMKNYWRQLLNAKLITQRKFDNLTKAERGGLSELDKAGFIKRQLVETRQITKHVAQILDSRMNTKYDENDKLIREVKVITLKSKLVSDFRKDFQFYKVREINNYHHAHDAYLNAVVGTALIKKYPKLESEFVYGDYKVYDVRKMIAKSEQEIGKATAKYFFYSNIMNFFKTEITLANGEIRKRPLIETNGETGEIVWDKGRDFATVRKVLSMPQVNIVKKTEVQTGGFSKESIRPKRNSDKLIARKKDWDPKKYGGFLWPTVAYSVLVVAKVEKGKSKKLKSVKELLGITIMERSSFEKNPIDFLEAKGYKEVKKDLIIKLPKYSLFELENGRKRMLASAKQLQKGNELALPSKYVNFLYLASHYEKLKGSPEDNEQKQLFVEQHKHYLDEIIEQISEFSKRVILADANLDKVLSAYNKHRDKPIREQAENIIHLFTLTRLGAPRAFKYFDTTIDPKQYRSTKEVLDATLIHQSITGLYETRIDLSQLGGD

SEQ ID NO: 5807 - protein, 1367 aa, synthetic construct
  REGION 1..1367: note = Description of Artificial Sequence: Synthetic polypeptide
DKKYSIGLDIGTNSVGWAVITDEYKVPSKKFKVLGNTDRHSIKKNLIGALLFDSGETAERTRLKRTARRRYTRRKNRICYLQEIFSNEMAKVDDSFFHRLEESFLVEEDKKHERHPIFGNIVDEVAYHEKYPTIYHLRKKLVDSTDKADLRLIYLALAHMIKFRGHFLIEGDLNPDNSDVDKLFIQLVQTYNQLFEENPINASGVDAKAILSARLSKSRRLENLIAQLPGEKKNGLFGNLIALSLGLTPNFKSNFDLAEDAKLQLSKDTYDDDLDNLLAQIGDQYADLFLAAKNLSDAILLSDILRVNTEITKAPLSASMIKRYDEHHQDLTLLKALVRQQLPEKYKEIFFDQSKNGYAGYIDGGASQEEFYKFIKPILEKMDGTEELLVKLNREDLLRKQRTFDNGSIPHQIHLGELHAILRRQEDFYPFLKDNREKIEKILTFRIPYYVGPLARGNSRFAWMTRKSEETITPWNFEEVVDKGASAQSFIERMTNFDKNLPNEKVLPKHSLLYEYFTVYNELTKVKYVTEGMRKPAFLSGEQKKAIVDLLFKTNRKVTVKQLKEDYFKKIECFDSVEISGVEDRFNASLGTYHDLLKIIKDKDFLDNEENEDILEDIVLTLTLFEDREMIEERLKTYAHLFDDKVMKQLKRRRYTGWGRLSRKLINGIRDKQSGKTILDFLKSDGFANRNFMQLIHDDSLTFKEDIQKAQVSGQGDSLHEHIANLAGSPAIKKGILQTVKVVDELVKVMGRHKPENIVIEMARENQTTQKGQKNSRERMKRIEEGIKELGSQILKEHPVENTQLQNEKLYLYYLQNGRDMYVDQELDINRLSDYDVDAIVPQSFLKDDSIDNKVLTRSDKNRGKSDNVPSEEVVKKMKNYWRQLLNAKLITQRKFDNLTKAERGGLSELDKAGFIKRQLVETRQITKHVAQILDSRMNTKYDENDKLIREVKVITLKSKLVSDFRKDFQFYKVREINNYHHAHDAYLNAVVGTALIKKYPKLESEFVYGDYKVYDVRKMIAKSEQEIGKATAKYFFYSNIMNFFKTEITLANGEIRKRPLIETNGETGEIVWDKGRDFATVRKVLSMPQVNIVKKTEVQTGGFSKESIRPKRNSDKLIARKKDWDPKKYGGFLWPTVAYSVLVVAKVEKGKSKKLKSVKELLGITIMERSSFEKNPIDFLEAKGYKEVKKDLIIKLPKYSLFELENGRKRMLASAKQLQKGNELALPSKYVNFLYLASHYEKLKGSPEDNEQKQLFVEQHKHYLDEIIEQISEFSKRVILADANLDKVLSAYNKHRDKPIREQAENIIHLFTLTRLGAPRAFKYFDTTIDPKQYRSTKEVLDATLIHQSITGLYETRIDLSQLGGD

SEQ ID NO: 5808 - protein, 1057 aa, synthetic construct
  REGION 1..1057: note = Description of Artificial Sequence: Synthetic polypeptide
MNQKFILGLDIGITSVGYGLIDYETKNIIDAGVRLFPEANVENNEGRRSKRGSRRLKRRRIHRLERVKLLLTEYDLINKEQIPTSNNPYQIRVKGLSEILSKDELAIALLHLAKRRGIHNVDVAADKEETASDSLSTKDQINKNAKFLESRYVCELQKERLENEGHVRGVENRFLTKDIVREAKKIIDTQMQYYPEIDETFKEKYISLVETRREYFEGPGQGSPFGWNGDLKKWYEMLMGHCTYFPQELRSVKYAYSADLFNALNDLNNLIIQRDNSEKLEYHEKYHIIENVFKQKKKPTLKQIAKEIGVNPEDIKGYRITKSGTPEFTSFKLFHDLKKVVKDHAILDDIDLLNQIAEILTIYQDKDSIVAELGQLEYLMSEADKQSISELTGYTGTHSLSLKCMNMIIDELWHSSMNQMEVFTYLNMRPKKYELKGYQRIPTDMIDDAILSPVVKRTFIQSINVINKVIEKYGIPEDIIIELARENNSDDRKKFINNLQKKNEATRKRINEIIGQTGNQNAKRIVEKIRLHDQQEGKCLYSLESIPLEDLLNNPNHYEVDHIIPRSVSFDNSYHNKVLVKQSENSKKSNLTPYQYFNSGKSKLSYNQFKQHILNLSKSQDRISKKKKEYLLEERDINKFEVQKEFINRNLVDTRYATRELTNYLKAYFSANNMNVKVKTINGSFTDYLRKVWKFKKERNHGYKHHAEDALIIANADFLFKENKKLKAVNSVLEKPEIETKQLDIQVDSEDNYSEMFIIPKQVQDIKDFRNFKYSHRVDKKPNRQLINDTLYSTRKKDNSTYIVQTIKDIYAKDNTTLKKQFDKSPEKFLMYQHDPRTFEKLEVIMKQYANEKNPLAKYHEETGEYLTKYSKKNNGPIVKSLKYIGNKLGSHLDVTHQFKSSTKKLVKLSIKNYRFDVYLTEKGYKFVTIAYLNVFKKDNYYYIPKDKYQELKEKKKIKDTDQFIASFYKNDLIKLNGDLYKIIGVNSDDRNIIELDYYDIKYKDYCEINNIKGEPRIKKTIGKKTESIEKFTTDVLGNLYLHSTEKAPQLIFKRGL

SEQ ID NO: 5809 - protein, 1056 aa, synthetic construct
  REGION 1..1056: note = Description of Artificial Sequence: Synthetic polypeptide
NQKFILGLDIGITSVGYGLIDYETKNIIDAGVRLFPEANVENNEGRRSKRGSRRLKRRRIHRLERVKLLLTEYDLINKEQIPTSNNPYQIRVKGLSEILSKDELAIALLHLAKRRGIHNVDVAADKEETASDSLSTKDQINKNAKFLESRYVCELQKERLENEGHVRGVENRFLTKDIVREAKKIIDTQMQYYPEIDETFKEKYISLVETRREYFEGPGQGSPFGWNGDLKKWYEMLMGHCTYFPQELRSVKYAYSADLFNALNDLNNLIIQRDNSEKLEYHEKYHIIENVFKQKKKPTLKQIAKEIGVNPEDIKGYRITKSGTPEFTSFKLFHDLKKVVKDHAILDDIDLLNQIAEILTIYQDKDSIVAELGQLEYLMSEADKQSISELTGYTGTHSLSLKCMNMIIDELWHSSMNQMEVFTYLNMRPKKYELKGYQRIPTDMIDDAILSPVVKRTFIQSINVINKVIEKYGIPEDIIIELARENNSDDRKKFINNLQKKNEATRKRINEIIGQTGNQNAKRIVEKIRLHDQQEGKCLYSLESIPLEDLLNNPNHYEVDHIIPRSVSFDNSYHNKVLVKQSENSKKSNLTPYQYFNSGKSKLSYNQFKQHILNLSKSQDRISKKKKEYLLEERDINKFEVQKEFINRNLVDTRYATRELTNYLKAYFSANNMNVKVKTINGSFTDYLRKVWKFKKERNHGYKHHAEDALIIANADFLFKENKKLKAVNSVLEKPEIETKQLDIQVDSEDNYSEMFIIPKQVQDIKDFRNFKYSHRVDKKPNRQLINDTLYSTRKKDNSTYIVQTIKDIYAKDNTTLKKQFDKSPEKFLMYQHDPRTFEKLEVIMKQYANEKNPLAKYHEETGEYLTKYSKKNNGPIVKSLKYIGNKLGSHLDVTHQFKSSTKKLVKLSIKNYRFDVYLTEKGYKFVTIAYLNVFKKDNYYYIPKDKYQELKEKKKIKDTDQFIASFYKNDLIKLNGDLYKIIGVNSDDRNIIELDYYDIKYKDYCEINNIKGEPRIKKTIGKKTESIEKFTTDVLGNLYLHSTEKAPQLIFKRGL

SEQ ID NO: 5810 - protein, 1057 aa, synthetic construct
  REGION 1..1057: note = Description of Artificial Sequence: Synthetic polypeptide
MNQKFILGLDIGITSVGYGLIDYETKNIIDAGVRLFPEANVENNEGRRSKRGSRRLKRRRIHRLERVKLLLTEYDLINKEQIPTSNNPYQIRVKGLSEILSKDELAIALLHLAKRRGIHNVDVAADKEETASDSLSTKDQINKNAKFLESRYVCELQKERLENEGHVRGVENRFLTKDIVREAKKIIDTQMQYYPEIDETFKEKYISLVETRREYFEGPGQGSPFGWNGDLKKWYEMLMGHCTYFPQELRSVKYAYSADLFNALNDLNNLIIQRDNSEKLEYHEKYHIIENVFKQKKKPTLKQIAKEIGVNPEDIKGYRITKSGTPEFTSFKLFHDLKKVVKDHAILDDIDLLNQIAEILTIYQDKDSIVAELGQLEYLMSEADKQSISELTGYTGTHSLSLKCMNMIIDELWHSSMNQMEVFTYLNMRPKKYELKGYQRIPTDMIDDAILSPVVKRTFIQSINVINKVIEKYGIPEDIIIELARENNSDDRKKFINNLQKKNEATRKRINEIIGQTGNQNAKRIVEKIRLHDQQEGKCLYSLESIPLEDLLNNPNHYEVDHIIPRSVSFDNSYHNKVLVKQSEASKKSNLTPYQYFNSGKSKLSYNQFKQHILNLSKSQDRISKKKKEYLLEERDINKFEVQKEFINRNLVDTRYATRELTNYLKAYFSANNMNVKVKTINGSFTDYLRKVWKFKKERNHGYKHHAEDALIIANADFLFKENKKLKAVNSVLEKPEIETKQLDIQVDSEDNYSEMFIIPKQVQDIKDFRNFKYSHRVDKKPNRQLINDTLYSTRKKDNSTYIVQTIKDIYAKDNTTLKKQFDKSPEKFLMYQHDPRTFEKLEVIMKQYANEKNPLAKYHEETGEYLTKYSKKNNGPIVKSLKYIGNKLGSHLDVTHQFKSSTKKLVKLSIKNYRFDVYLTEKGYKFVTIAYLNVFKKDNYYYIPKDKYQELKEKKKIKDTDQFIASFYKNDLIKLNGDLYKIIGVNSDDRNIIELDYYDIKYKDYCEINNIKGEPRIKKTIGKKTESIEKFTTDVLGNLYLHSTEKAPQLIFKRGL

SEQ ID NO: 5811 - protein, 1056 aa, synthetic construct
  REGION 1..1056: note = Description of Artificial Sequence: Synthetic polypeptide
NQKFILGLDIGITSVGYGLIDYETKNIIDAGVRLFPEANVENNEGRRSKRGSRRLKRRRIHRLERVKLLLTEYDLINKEQIPTSNNPYQIRVKGLSEILSKDELAIALLHLAKRRGIHNVDVAADKEETASDSLSTKDQINKNAKFLESRYVCELQKERLENEGHVRGVENRFLTKDIVREAKKIIDTQMQYYPEIDETFKEKYISLVETRREYFEGPGQGSPFGWNGDLKKWYEMLMGHCTYFPQELRSVKYAYSADLFNALNDLNNLIIQRDNSEKLEYHEKYHIIENVFKQKKKPTLKQIAKEIGVNPEDIKGYRITKSGTPEFTSFKLFHDLKKVVKDHAILDDIDLLNQIAEILTIYQDKDSIVAELGQLEYLMSEADKQSISELTGYTGTHSLSLKCMNMIIDELWHSSMNQMEVFTYLNMRPKKYELKGYQRIPTDMIDDAILSPVVKRTFIQSINVINKVIEKYGIPEDIIIELARENNSDDRKKFINNLQKKNEATRKRINEIIGQTGNQNAKRIVEKIRLHDQQEGKCLYSLESIPLEDLLNNPNHYEVDHIIPRSVSFDNSYHNKVLVKQSEASKKSNLTPYQYFNSGKSKLSYNQFKQHILNLSKSQDRISKKKKEYLLEERDINKFEVQKEFINRNLVDTRYATRELTNYLKAYFSANNMNVKVKTINGSFTDYLRKVWKFKKERNHGYKHHAEDALIIANADFLFKENKKLKAVNSVLEKPEIETKQLDIQVDSEDNYSEMFIIPKQVQDIKDFRNFKYSHRVDKKPNRQLINDTLYSTRKKDNSTYIVQTIKDIYAKDNTTLKKQFDKSPEKFLMYQHDPRTFEKLEVIMKQYANEKNPLAKYHEETGEYLTKYSKKNNGPIVKSLKYIGNKLGSHLDVTHQFKSSTKKLVKLSIKNYRFDVYLTEKGYKFVTIAYLNVFKKDNYYYIPKDKYQELKEKKKIKDTDQFIASFYKNDLIKLNGDLYKIIGVNSDDRNIIELDYYDIKYKDYCEINNIKGEPRIKKTIGKKTESIEKFTTDVLGNLYLHSTEKAPQLIFKRGL

SEQ ID NO: 5812 - protein, 1057 aa, synthetic construct
  REGION 1..1057: note = Description of Artificial Sequence: Synthetic polypeptide
MNQKFILGLDIGITSVGYGLIDYETKNIIDAGVRLFPEANVENNEGRRSKRGSRRLKRRRIHRLERVKLLLTEYDLINKEQIPTSNNPYQIRVKGLSEILSKDELAIALLHLAKRRGIHNVDVAADKEETASDSLSTKDQINKNAKFLESRYVCELQKERLENEGHVRGVENRFLTKDIVREAKKIIDTQMQYYPEIDETFKEKYISLVETRREYFEGPGQGSPFGWNGDLKKWYEMLMGHCTYFPQELRSVKYAYSADLFNALNDLNNLIIQRDNSEKLEYHEKYHIIENVFKQKKKPTLKQIAKEIGVNPEDIKGYRITKSGTPEFTSFKLFHDLKKVVKDHAILDDIDLLNQIAEILTIYQDKDSIVAELGQLEYLMSEADKQSISELTGYTGTHSLSLKCMNMIIDELWHSSMNQMEVFTYLNMRPKKYELKGYQRIPTDMIDDAILSPVVKRTFIQSINVINKVIEKYGIPEDIIIELARENNSDDRKKFINNLQKKNEATRKRINEIIGQTGNQNAKRIVEKIRLHDQQEGKCLYSLESIPLEDLLNNPNHYEVDHIIPRSVSFDNSYHNKVLVKQSENSKKSNLTPYQYFNSGKSKLSYNQFKQHILNLSKSQDRISKKKKEYLLEERDINKFEVQKEFINRNLVDTRYATRELTSYLKAYFSANNMDVKVKTINGSFTNHLRKVWRFDKYRNHGYKHHAEDALIIANADFLFKENKKLQNTNKILEKPTIENNTKKVTVEKEEDYNNVFETPKLVEDIKQYRDYKFSHRVDKKPNRQLINDTLYSTRMKDEHDYIVQTITDIYGKDNTNLKKQFNKNPEKFLMYQNDPKTFEKLSIIMKQYSDEKNPLAKYYEETGEYLTKYSKKNNGPIVKKIKLLGNKVGNHLDVTNKYENSTKKLVKLSIKNYRFDVYLTEKGYKFVTIAYLNVFKKDNYYYIPKDKYQELKEKKKIKDTDQFIASFYKNDLIKLNGDLYKIIGVNSDDRNIIELDYYDIKYKDYCEINNIKGEPRIKKTIGKKTESIEKFTTDVLGNLYLHSTEKAPQLIFKRGL

SEQ ID NO: 5813 - protein, 1056 aa, synthetic construct
  REGION 1..1056: note = Description of Artificial Sequence: Synthetic polypeptide
NQKFILGLDIGITSVGYGLIDYETKNIIDAGVRLFPEANVENNEGRRSKRGSRRLKRRRIHRLERVKLLLTEYDLINKEQIPTSNNPYQIRVKGLSEILSKDELAIALLHLAKRRGIHNVDVAADKEETASDSLSTKDQINKNAKFLESRYVCELQKERLENEGHVRGVENRFLTKDIVREAKKIIDTQMQYYPEIDETFKEKYISLVETRREYFEGPGQGSPFGWNGDLKKWYEMLMGHCTYFPQELRSVKYAYSADLFNALNDLNNLIIQRDNSEKLEYHEKYHIIENVFKQKKKPTLKQIAKEIGVNPEDIKGYRITKSGTPEFTSFKLFHDLKKVVKDHAILDDIDLLNQIAEILTIYQDKDSIVAELGQLEYLMSEADKQSISELTGYTGTHSLSLKCMNMIIDELWHSSMNQMEVFTYLNMRPKKYELKGYQRIPTDMIDDAILSPVVKRTFIQSINVINKVIEKYGIPEDIIIELARENNSDDRKKFINNLQKKNEATRKRINEIIGQTGNQNAKRIVEKIRLHDQQEGKCLYSLESIPLEDLLNNPNHYEVDHIIPRSVSFDNSYHNKVLVKQSENSKKSNLTPYQYFNSGKSKLSYNQFKQHILNLSKSQDRISKKKKEYLLEERDINKFEVQKEFINRNLVDTRYATRELTSYLKAYFSANNMDVKVKTINGSFTNHLRKVWRFDKYRNHGYKHHAEDALIIANADFLFKENKKLQNTNKILEKPTIENNTKKVTVEKEEDYNNVFETPKLVEDIKQYRDYKFSHRVDKKPNRQLINDTLYSTRMKDEHDYIVQTITDIYGKDNTNLKKQFNKNPEKFLMYQNDPKTFEKLSIIMKQYSDEKNPLAKYYEETGEYLTKYSKKNNGPIVKKIKLLGNKVGNHLDVTNKYENSTKKLVKLSIKNYRFDVYLTEKGYKFVTIAYLNVFKKDNYYYIPKDKYQELKEKKKIKDTDQFIASFYKNDLIKLNGDLYKIIGVNSDDRNIIELDYYDIKYKDYCEINNIKGEPRIKKTIGKKTESIEKFTTDVLGNLYLHSTEKAPQLIFKRGL

SEQ ID NO: 5814 - protein, 1057 aa, synthetic construct
  REGION 1..1057: note = Description of Artificial Sequence: Synthetic polypeptide
MNQKFILGLDIGITSVGYGLIDYETKNIIDAGVRLFPEANVENNEGRRSKRGSRRLKRRRIHRLERVKLLLTEYDLINKEQIPTSNNPYQIRVKGLSEILSKDELAIALLHLAKRRGIHNVDVAADKEETASDSLSTKDQINKNAKFLESRYVCELQKERLENEGHVRGVENRFLTKDIVREAKKIIDTQMQYYPEIDETFKEKYISLVETRREYFEGPGQGSPFGWNGDLKKWYEMLMGHCTYFPQELRSVKYAYSADLFNALNDLNNLIIQRDNSEKLEYHEKYHIIENVFKQKKKPTLKQIAKEIGVNPEDIKGYRITKSGTPEFTSFKLFHDLKKVVKDHAILDDIDLLNQIAEILTIYQDKDSIVAELGQLEYLMSEADKQSISELTGYTGTHSLSLKCMNMIIDELWHSSMNQMEVFTYLNMRPKKYELKGYQRIPTDMIDDAILSPVVKRTFIQSINVINKVIEKYGIPEDIIIELARENNSDDRKKFINNLQKKNEATRKRINEIIGQTGNQNAKRIVEKIRLHDQQEGKCLYSLESIPLEDLLNNPNHYEVDHIIPRSVSFDNSYHNKVLVKQSEASKKSNLTPYQYFNSGKSKLSYNQFKQHILNLSKSQDRISKKKKEYLLEERDINKFEVQKEFINRNLVDTRYATRELTSYLKAYFSANNMDVKVKTINGSFTNHLRKVWRFDKYRNHGYKHHAEDALIIANADFLFKENKKLQNTNKILEKPTIENNTKKVTVEKEEDYNNVFETPKLVEDIKQYRDYKFSHRVDKKPNRQLINDTLYSTRMKDEHDYIVQTITDIYGKDNTNLKKQFNKNPEKFLMYQNDPKTFEKLSIIMKQYSDEKNPLAKYYEETGEYLTKYSKKNNGPIVKKIKLLGNKVGNHLDVTNKYENSTKKLVKLSIKNYRFDVYLTEKGYKFVTIAYLNVFKKDNYYYIPKDKYQELKEKKKIKDTDQFIASFYKNDLIKLNGDLYKIIGVNSDDRNIIELDYYDIKYKDYCEINNIKGEPRIKKTIGKKTESIEKFTTDVLGNLYLHSTEKAPQLIFKRGL

SEQ ID NO: 5815 - protein, 1056 aa, synthetic construct
  REGION 1..1056: note = Description of Artificial Sequence: Synthetic polypeptide
NQKFILGLDIGITSVGYGLIDYETKNIIDAGVRLFPEANVENNEGRRSKRGSRRLKRRRIHRLERVKLLLTEYDLINKEQIPTSNNPYQIRVKGLSEILSKDELAIALLHLAKRRGIHNVDVAADKEETASDSLSTKDQINKNAKFLESRYVCELQKERLENEGHVRGVENRFLTKDIVREAKKIIDTQMQYYPEIDETFKEKYISLVETRREYFEGPGQGSPFGWNGDLKKWYEMLMGHCTYFPQELRSVKYAYSADLFNALNDLNNLIIQRDNSEKLEYHEKYHIIENVFKQKKKPTLKQIAKEIGVNPEDIKGYRITKSGTPEFTSFKLFHDLKKVVKDHAILDDIDLLNQIAEILTIYQDKDSIVAELGQLEYLMSEADKQSISELTGYTGTHSLSLKCMNMIIDELWHSSMNQMEVFTYLNMRPKKYELKGYQRIPTDMIDDAILSPVVKRTFIQSINVINKVIEKYGIPEDIIIELARENNSDDRKKFINNLQKKNEATRKRINEIIGQTGNQNAKRIVEKIRLHDQQEGKCLYSLESIPLEDLLNNPNHYEVDHIIPRSVSFDNSYHNKVLVKQSEASKKSNLTPYQYFNSGKSKLSYNQFKQHILNLSKSQDRISKKKKEYLLEERDINKFEVQKEFINRNLVDTRYATRELTSYLKAYFSANNMDVKVKTINGSFTNHLRKVWRFDKYRNHGYKHHAEDALIIANADFLFKENKKLQNTNKILEKPTIENNTKKVTVEKEEDYNNVFETPKLVEDIKQYRDYKFSHRVDKKPNRQLINDTLYSTRMKDEHDYIVQTITDIYGKDNTNLKKQFNKNPEKFLMYQNDPKTFEKLSIIMKQYSDEKNPLAKYYEETGEYLTKYSKKNNGPIVKKIKLLGNKVGNHLDVTNKYENSTKKLVKLSIKNYRFDVYLTEKGYKFVTIAYLNVFKKDNYYYIPKDKYQELKEKKKIKDTDQFIASFYKNDLIKLNGDLYKIIGVNSDDRNIIELDYYDIKYKDYCEINNIKGEPRIKKTIGKKTESIEKFTTDVLGNLYLHSTEKAPQLIFKRGL

SEQ ID NO: 5816 - protein, 1368 aa, synthetic construct
  REGION 1..1368: note = Description of Artificial Sequence: Synthetic polypeptide
MDKKYSIGLDIGTNSVGWAVITDEYKVPSKKFKVLGNTDRHSIKKNLIGALLFDSGETAEATRLKRTARRRYTRRKNRICYLQEIFSNEMAKVDDSFFHRLEESFLVEEDKKHERHPIFGNIVDEVAYHEKYPTIYHLRKKLVDSTDKADLRLIYLALAHMIKFRGHFLIEGDLNPDNSDVDKLFIQLVQTYNQLFEENPINASGVDAKAILSARLSKSRRLENLIAQLPGEKKNGLFGNLIALSLGLTPNFKSNFDLAEDAKLQLSKDTYDDDLDNLLAQIGDQYADLFLAAKNLSDAILLSDILRVNTEITKAPLSASMIKRYDEHHQDLTLLKALVRQQLPEKYKEIFFDQSKNGYAGYIDGGASQEEFYKFIKPILEKMDGTEELLVKLNREDLLRKQRTFDNGSIPHQIHLGELHAILRRQEDFYPFLKDNREKIEKILTFRIPYYVGPLARGNSRFAWMTRKSEETITPWNFEEVVDKGASAQSFIERMTNFDKNLPNEKVLPKHSLLYEYFTVYNELTKVKYVTEGMRKPAFLSGEQKKAIVDLLFKTNRKVTVKQLKEDYFKKIECFDSVEISGVEDRFNASLGTYHDLLKIIKDKDFLDNEENEDILEDIVLTLTLFEDREMIEERLKTYAHLFDDKVMKQLKRRRYTGWGRLSRKLINGIRDKQSGKTILDFLKSDGFANRNFMQLIHDDSLTFKEDIQKAQVSGQGDSLHEHIANLAGSPAIKKGILQTVKVVDELVKVMGRHKPENIVIEMARENQTTQKGQKNSRERMKRIEEGIKELGSQILKEHPVENTQLQNEKLYLYYLQNGRDMYVDQELDINRLSDYDVDHIVPQSFLKDDSIDNKVLTRSDKNRGKSDNVPSEEVVKKMKNYWRQLLNAKLITQRKFDNLTKAERGGLSELDKAGFIKRQLVETRQITKHVAQILDSRMNTKYDENDKLIREVKVITLKSKLVSDFRKDFQFYKVREINNYHHAHDAYLNAVVGTALIKKYPKLESEFVYGDYKVYDVRKMIAKSEQEIGKATAKYFFYSNIMNFFKTEITLANGEIRKRPLIETNGETGEIVWDKGRDFATVRKVLSMPQVNIVKKTEVQTGGFSKESILPKRNSDKLIARKKDWDPKKYGGFLWPTVAYSVLVVAKVEKGKSKKLKSVKELLGITIMERSSFEKNPIDFLEAKGYKEVKKDLIIKLPKYSLFELENGRKRMLASAKQLQKGNELALPSKYVNFLYLASHYEKLKGSPEDNEQKQLFVEQHKHYLDEIIEQISEFSKRVILADANLDKVLSAYNKHRDKPIREQAENIIHLFTLTNLGAPAAFKYFDTTIDRKQYRSTKEVLDATLIHQSITGLYETRIDLSQLGGD

SEQ ID NO: 5817 - protein, 1367 aa, synthetic construct
  REGION 1..1367: note = Description of Artificial Sequence: Synthetic polypeptide
DKKYSIGLDIGTNSVGWAVITDEYKVPSKKFKVLGNTDRHSIKKNLIGALLFDSGETAEATRLKRTARRRYTRRKNRICYLQEIFSNEMAKVDDSFFHRLEESFLVEEDKKHERHPIFGNIVDEVAYHEKYPTIYHLRKKLVDSTDKADLRLIYLALAHMIKFRGHFLIEGDLNPDNSDVDKLFIQLVQTYNQLFEENPINASGVDAKAILSARLSKSRRLENLIAQLPGEKKNGLFGNLIALSLGLTPNFKSNFDLAEDAKLQLSKDTYDDDLDNLLAQIGDQYADLFLAAKNLSDAILLSDILRVNTEITKAPLSASMIKRYDEHHQDLTLLKALVRQQLPEKYKEIFFDQSKNGYAGYIDGGASQEEFYKFIKPILEKMDGTEELLVKLNREDLLRKQRTFDNGSIPHQIHLGELHAILRRQEDFYPFLKDNREKIEKILTFRIPYYVGPLARGNSRFAWMTRKSEETITPWNFEEVVDKGASAQSFIERMTNFDKNLPNEKVLPKHSLLYEYFTVYNELTKVKYVTEGMRKPAFLSGEQKKAIVDLLFKTNRKVTVKQLKEDYFKKIECFDSVEISGVEDRFNASLGTYHDLLKIIKDKDFLDNEENEDILEDIVLTLTLFEDREMIEERLKTYAHLFDDKVMKQLKRRRYTGWGRLSRKLINGIRDKQSGKTILDFLKSDGFANRNFMQLIHDDSLTFKEDIQKAQVSGQGDSLHEHIANLAGSPAIKKGILQTVKVVDELVKVMGRHKPENIVIEMARENQTTQKGQKNSRERMKRIEEGIKELGSQILKEHPVENTQLQNEKLYLYYLQNGRDMYVDQELDINRLSDYDVDHIVPQSFLKDDSIDNKVLTRSDKNRGKSDNVPSEEVVKKMKNYWRQLLNAKLITQRKFDNLTKAERGGLSELDKAGFIKRQLVETRQITKHVAQILDSRMNTKYDENDKLIREVKVITLKSKLVSDFRKDFQFYKVREINNYHHAHDAYLNAVVGTALIKKYPKLESEFVYGDYKVYDVRKMIAKSEQEIGKATAKYFFYSNIMNFFKTEITLANGEIRKRPLIETNGETGEIVWDKGRDFATVRKVLSMPQVNIVKKTEVQTGGFSKESILPKRNSDKLIARKKDWDPKKYGGFLWPTVAYSVLVVAKVEKGKSKKLKSVKELLGITIMERSSFEKNPIDFLEAKGYKEVKKDLIIKLPKYSLFELENGRKRMLASAKQLQKGNELALPSKYVNFLYLASHYEKLKGSPEDNEQKQLFVEQHKHYLDEIIEQISEFSKRVILADANLDKVLSAYNKHRDKPIREQAENIIHLFTLTNLGAPAAFKYFDTTIDRKQYRSTKEVLDATLIHQSITGLYETRIDLSQLGGD

SEQ ID NO: 5818 - protein, 1368 aa, synthetic construct
  REGION 1..1368: note = Description of Artificial Sequence: Synthetic polypeptide
MDKKYSIGLDIGTNSVGWAVITDEYKVPSKKFKVLGNTDRHSIKKNLIGALLFDSGETAEATRLKRTARRRYTRRKNRICYLQEIFSNEMAKVDDSFFHRLEESFLVEEDKKHERHPIFGNIVDEVAYHEKYPTIYHLRKKLVDSTDKADLRLIYLALAHMIKFRGHFLIEGDLNPDNSDVDKLFIQLVQTYNQLFEENPINASGVDAKAILSARLSKSRRLENLIAQLPGEKKNGLFGNLIALSLGLTPNFKSNFDLAEDAKLQLSKDTYDDDLDNLLAQIGDQYADLFLAAKNLSDAILLSDILRVNTEITKAPLSASMIKRYDEHHQDLTLLKALVRQQLPEKYKEIFFDQSKNGYAGYIDGGASQEEFYKFIKPILEKMDGTEELLVKLNREDLLRKQRTFDNGSIPHQIHLGELHAILRRQEDFYPFLKDNREKIEKILTFRIPYYVGPLARGNSRFAWMTRKSEETITPWNFEEVVDKGASAQSFIERMTNFDKNLPNEKVLPKHSLLYEYFTVYNELTKVKYVTEGMRKPAFLSGEQKKAIVDLLFKTNRKVTVKQLKEDYFKKIECFDSVEISGVEDRFNASLGTYHDLLKIIKDKDFLDNEENEDILEDIVLTLTLFEDREMIEERLKTYAHLFDDKVMKQLKRRRYTGWGRLSRKLINGIRDKQSGKTILDFLKSDGFANRNFMQLIHDDSLTFKEDIQKAQVSGQGDSLHEHIANLAGSPAIKKGILQTVKVVDELVKVMGRHKPENIVIEMARENQTTQKGQKNSRERMKRIEEGIKELGSQILKEHPVENTQLQNEKLYLYYLQNGRDMYVDQELDINRLSDYDVDAIVPQSFLKDDSIDNKVLTRSDKNRGKSDNVPSEEVVKKMKNYWRQLLNAKLITQRKFDNLTKAERGGLSELDKAGFIKRQLVETRQITKHVAQILDSRMNTKYDENDKLIREVKVITLKSKLVSDFRKDFQFYKVREINNYHHAHDAYLNAVVGTALIKKYPKLESEFVYGDYKVYDVRKMIAKSEQEIGKATAKYFFYSNIMNFFKTEITLANGEIRKRPLIETNGETGEIVWDKGRDFATVRKVLSMPQVNIVKKTEVQTGGFSKESILPKRNSDKLIARKKDWDPKKYGGFLWPTVAYSVLVVAKVEKGKSKKLKSVKELLGITIMERSSFEKNPIDFLEAKGYKEVKKDLIIKLPKYSLFELENGRKRMLASAKQLQKGNELALPSKYVNFLYLASHYEKLKGSPEDNEQKQLFVEQHKHYLDEIIEQISEFSKRVILADANLDKVLSAYNKHRDKPIREQAENIIHLFTLTNLGAPAAFKYFDTTIDRKQYRSTKEVLDATLIHQSITGLYETRIDLSQLGGD

SEQ ID NO: 5819 - protein, 1367 aa, synthetic construct
  REGION 1..1367: note = Description of Artificial Sequence: Synthetic polypeptide
DKKYSIGLDIGTNSVGWAVITDEYKVPSKKFKVLGNTDRHSIKKNLIGALLFDSGETAEATRLKRTARRRYTRRKNRICYLQEIFSNEMAKVDDSFFHRLEESFLVEEDKKHERHPIFGNIVDEVAYHEKYPTIYHLRKKLVDSTDKADLRLIYLALAHMIKFRGHFLIEGDLNPDNSDVDKLFIQLVQTYNQLFEENPINASGVDAKAILSARLSKSRRLENLIAQLPGEKKNGLFGNLIALSLGLTPNFKSNFDLAEDAKLQLSKDTYDDDLDNLLAQIGDQYADLFLAAKNLSDAILLSDILRVNTEITKAPLSASMIKRYDEHHQDLTLLKALVRQQLPEKYKEIFFDQSKNGYAGYIDGGASQEEFYKFIKPILEKMDGTEELLVKLNREDLLRKQRTFDNGSIPHQIHLGELHAILRRQEDFYPFLKDNREKIEKILTFRIPYYVGPLARGNSRFAWMTRKSEETITPWNFEEVVDKGASAQSFIERMTNFDKNLPNEKVLPKHSLLYEYFTVYNELTKVKYVTEGMRKPAFLSGEQKKAIVDLLFKTNRKVTVKQLKEDYFKKIECFDSVEISGVEDRFNASLGTYHDLLKIIKDKDFLDNEENEDILEDIVLTLTLFEDREMIEERLKTYAHLFDDKVMKQLKRRRYTGWGRLSRKLINGIRDKQSGKTILDFLKSDGFANRNFMQLIHDDSLTFKEDIQKAQVSGQGDSLHEHIANLAGSPAIKKGILQTVKVVDELVKVMGRHKPENIVIEMARENQTTQKGQKNSRERMKRIEEGIKELGSQILKEHPVENTQLQNEKLYLYYLQNGRDMYVDQELDINRLSDYDVDAIVPQSFLKDDSIDNKVLTRSDKNRGKSDNVPSEEVVKKMKNYWRQLLNAKLITQRKFDNLTKAERGGLSELDKAGFIKRQLVETRQITKHVAQILDSRMNTKYDENDKLIREVKVITLKSKLVSDFRKDFQFYKVREINNYHHAHDAYLNAVVGTALIKKYPKLESEFVYGDYKVYDVRKMIAKSEQEIGKATAKYFFYSNIMNFFKTEITLANGEIRKRPLIETNGETGEIVWDKGRDFATVRKVLSMPQVNIVKKTEVQTGGFSKESILPKRNSDKLIARKKDWDPKKYGGFLWPTVAYSVLVVAKVEKGKSKKLKSVKELLGITIMERSSFEKNPIDFLEAKGYKEVKKDLIIKLPKYSLFELENGRKRMLASAKQLQKGNELALPSKYVNFLYLASHYEKLKGSPEDNEQKQLFVEQHKHYLDEIIEQISEFSKRVILADANLDKVLSAYNKHRDKPIREQAENIIHLFTLTNLGAPAAFKYFDTTIDRKQYRSTKEVLDATLIHQSITGLYETRIDLSQLGGD

SEQ ID NO: 5820-5825 - skipped (6 entries)

SEQ ID NO: 5826 - protein, 7 aa, synthetic construct
  REGION 1..7: note = Description of Artificial Sequence: Synthetic peptide
PKKKRKV

SEQ ID NO: 5827 - protein, 19 aa, synthetic construct
  REGION 1..19: note = Description of Artificial Sequence: Synthetic peptide
MKRTADGSEFESPKKKRKV

SEQ ID NO: 5828 - protein, 30 aa, synthetic construct
  REGION 1..30: note = Description of Artificial Sequence: Synthetic polypeptide
MDSLLMNRRKFLYQFKNVRWAKGRRETYLC

SEQ ID NO: 5829 - protein, 20 aa, synthetic construct
  REGION 1..20: note = Description of Artificial Sequence: Synthetic peptide
AVKRPAATKKAGQAKKKKLD

SEQ ID NO: 5830 - protein, 25 aa, synthetic construct
  REGION 1..25: note = Description of Artificial Sequence: Synthetic peptide
MSRRRKANPTKLSENAKKLAKEVEN

SEQ ID NO: 5831 - protein, 9 aa, synthetic construct
  REGION 1..9: note = Description of Artificial Sequence: Synthetic peptide
PAAKRVKLD

SEQ ID NO: 5832 - protein, 9 aa, synthetic construct
  REGION 1..9: note = Description of Artificial Sequence: Synthetic peptide
KLKIKRPVK

SEQ ID NO: 5833 - protein, 8 aa, synthetic construct
  REGION 1..8: note = Description of Artificial Sequence: Synthetic peptide
VSRKRPRP

SEQ ID NO: 5834 - protein, 10 aa, synthetic construct
  REGION 1..10: note = Description of Artificial Sequence: Synthetic peptide
EGAPPAKRAR

SEQ ID NO: 5835 - protein, 12 aa, synthetic construct
  REGION 1..12: note = Description of Artificial Sequence: Synthetic peptide
PPQPKKKPLDGE

SEQ ID NO: 5836 - protein, 21 aa, synthetic construct
  REGION 1..21: note = Description of Artificial Sequence: Synthetic peptide
SGGSKRTADGSEFEPKKKRKV

SEQ ID NO: 5837 - protein, 2117 aa, synthetic construct
  REGION 1..2117: note = Description of Artificial Sequence: Synthetic polypeptide
MKRTADGSEFESPKKKRKVDKKYSIGLDIGTNSVGWAVITDEYKVPSKKFKVLGNTDRHSIKKNLIGALLFDSGETAEATRLKRTARRRYTRRKNRICYLQEIFSNEMAKVDDSFFHRLEESFLVEEDKKHERHPIFGNIVDEVAYHEKYPTIYHLRKKLVDSTDKADLRLIYLALAHMIKFRGHFLIEGDLNPDNSDVDKLFIQLVQTYNQLFEENPINASGVDAKAILSARLSKSRRLENLIAQLPGEKKNGLFGNLIALSLGLTPNFKSNFDLAEDAKLQLSKDTYDDDLDNLLAQIGDQYADLFLAAKNLSDAILLSDILRVNTEITKAPLSASMIKRYDEHHQDLTLLKALVRQQLPEKYKEIFFDQSKNGYAGYIDGGASQEEFYKFIKPILEKMDGTEELLVKLNREDLLRKQRTFDNGSIPHQIHLGELHAILRRQEDFYPFLKDNREKIEKILTFRIPYYVGPLARGNSRFAWMTRKSEETITPWNFEEVVDKGASAQSFIERMTNFDKNLPNEKVLPKHSLLYEYFTVYNELTKVKYVTEGMRKPAFLSGEQKKAIVDLLFKTNRKVTVKQLKEDYFKKIECFDSVEISGVEDRFNASLGTYHDLLKIIKDKDFLDNEENEDILEDIVLTLTLFEDREMIEERLKTYAHLFDDKVMKQLKRRRYTGWGRLSRKLINGIRDKQSGKTILDFLKSDGFANRNFMQLIHDDSLTFKEDIQKAQVSGQGDSLHEHIANLAGSPAIKKGILQTVKVVDELVKVMGRHKPENIVIEMARENQTTQKGQKNSRERMKRIEEGIKELGSQILKEHPVENTQLQNEKLYLYYLQNGRDMYVDQELDINRLSDYDVDAIVPQSFLKDDSIDNKVLTRSDKNRGKSDNVPSEEVVKKMKNYWRQLLNAKLITQRKFDNLTKAERGGLSELDKAGFIKRQLVETRQITKHVAQILDSRMNTKYDENDKLIREVKVITLKSKLVSDFRKDFQFYKVREINNYHHAHDAYLNAVVGTALIKKYPKLESEFVYGDYKVYDVRKMIAKSEQEIGKATAKYFFYSNIMNFFKTEITLANGEIRKRPLIETNGETGEIVWDKGRDFATVRKVLSMPQVNIVKKTEVQTGGFSKESILPKRNSDKLIARKKDWDPKKYGGFDSPTVAYSVLVVAKVEKGKSKKLKSVKELLGITIMERSSFEKNPIDFLEAKGYKEVKKDLIIKLPKYSLFELENGRKRMLASAGELQKGNELALPSKYVNFLYLASHYEKLKGSPEDNEQKQLFVEQHKHYLDEIIEQISEFSKRVILADANLDKVLSAYNKHRDKPIREQAENIIHLFTLTNLGAPAAFKYFDTTIDRKRYTSTKEVLDATLIHQSITGLYETRIDLSQLGGDSGGSSGGSSGSETPGTSESATPESSGGSSGGSSTLNIEDEYRLHETSKEPDVSLGSTWLSDFPQAWAETGGMGLAVRQAPLIIPLKATSTPVSIKQYPMSQEARLGIKPHIQRLLDQGILVPCQSPWNTPLLPVKKPGTNDYRPVQDLREVNKRVEDIHPTVPNPYNLLSGLPPSHQWYTVLDLKDAFFCLRLHPTSQPLFAFEWRDPEMGISGQLTWTRLPQGFKNSPTLFNEALHRDLADFRIQHPDLILLQYVDDLLLAATSELDCQQGTRALLQTLGNLGYRASAKKAQICQKQVKYLGYLLKEGQRWLTEARKETVMGQPTPKTPRQLREFLGKAGFCRLFIPGFAEMAAPLYPLTKPGTLFNWGPDQQKAYQEIKQALLTAPALGLPDLTKPFELFVDEKQGYAKGVLTQKLGPWRRPVAYLSKKLDPVAAGWPPCLRMVAAIAVLTKDAGKLTMGQPLVILAPHAVEALVKQPPDRWLSNARMTHYQALLLDTDRVQFGPVVALNPATLLPLPEEGLQHNCLDILAEAHGTRPDLTDQPLPDADHTWYTDGSSLLQEGQRKAGAAVTTETEVIWAKALPAGTSAQRAELIALTQALKMAEGKKLNVYTDSRYAFATAHIHGEIYRRRGWLTSEGKEIKNKDEILALLKALFLPKRLSIIHCPGHQKGHSAEARGNRMADQAARKAAITETPDTSTLLIENSSPSGGSKRTADGSEFEPKKKRKV

SEQ ID NO: 5838 - protein, 2131 aa, synthetic construct
  REGION 1..2131: note = Description of Artificial Sequence: Synthetic polypeptide
MKRTADGSEFESPKKKRKVDKKYSIGLDIGTNSVGWAVITDEYKVPSKKFKVLGNTDRHSIKKNLIGALLFDSGETAEATRLKRTARRRYTRRKNRICYLQEIFSNEMAKVDDSFFHRLEESFLVEEDKKHERHPIFGNIVDEVAYHEKYPTIYHLRKKLVDSTDKADLRLIYLALAHMIKFRGHFLIEGDLNPDNSDVDKLFIQLVQTYNQLFEENPINASGVDAKAILSARLSKSRKLENLIAQLPGEKKNGLFGNLIALSLGLTPNFKSNFDLAEDAKLQLSKDTYDDDLDNLLAQIGDQYADLFLAAKNLSDAILLSDILRVNTEITKAPLSASMIKRYDEHHQDLTLLKALVRQQLPEKYKEIFFDQSKNGYAGYIDGGASQEEFYKFIKPILEKMDGTEELLVKLKREDLLRKQRTFDNGSIPHQIHLGELHAILRRQEDFYPFLKDNREKIEKILTFRIPYYVGPLARGNSRFAWMTRKSEETITPWNFEEVVDKGASAQSFIERMTNFDKNLPNEKVLPKHSLLYEYFTVYNELTKVKYVTEGMRKPAFLSGEQKKAIVDLLFKTNRKVTVKQLKEDYFKKIECFDSVEISGVEDRFNASLGTYHDLLKIIKDKDFLDNEENEDILEDIVLTLTLFEDREMIEERLKTYAHLFDDKVMKQLKRRRYTGWGRLSRKLINGIRDKQSGKTILDFLKSDGFANRNFMQLIHDDSLTFKEDIQKAQVSGQGDSLHEHIANLAGSPAIKKGILQTVKVVDELVKVMGRHKPENIVIEMARENQTTQKGQKNSRERMKRIEEGIKELGSQILKEHPVENTQLQNEKLYLYYLQNGRDMYVDQELDINRLSDYDVDAIVPQSFLKDDSIDNKVLTRSDKNRGKSDNVPSEEVVKKMKNYWRQLLNAKLITQRKFDNLTKAERGGLSELDKAGFIKRQLVETRQITKHVAQILDSRMNTKYDENDKLIREVKVITLKSKLVSDFRKDFQFYKVREINNYHHAHDAYLNAVVGTALIKKYPKLESEFVYGDYKVYDVRKMIAKSEQEIGKATAKYFFYSNIMNFFKTEITLANGEIRKRPLIETNGETGEIVWDKGRDFATVRKVLSMPQVNIVKKTEVQTGGFSKESILPKRNSDKLIARKKDWDPKKYGGFDSPTVAYSVLVVAKVEKGKSKKLKSVKELLGITIMERSSFEKNPIDFLEAKGYKEVKKDLIIKLPKYSLFELENGRKRMLASAGELQKGNELALPSKYVNFLYLASHYEKLKGSPEDNEQKQLFVEQHKHYLDEIIEQISEFSKRVILADANLDKVLSAYNKHRDKPIREQAENIIHLFTLTNLGAPAAFKYFDTTIDRKRYTSTKEVLDATLIHQSITGLYETRIDLSQLGGDSGGSSGGSKRTADGSEFESPKKKRKVSGGSSGGSTLNIEDEYRLHETSKEPDVSLGSTWLSDFPQAWAETGGMGLAVRQAPLIIPLKATSTPVSIKQYPMSQEARLGIKPHIQRLLDQGILVPCQSPWNTPLLPVKKPGTNDYRPVQDLREVNKRVEDIHPTVPNPYNLLSGLPPSHQWYTVLDLKDAFFCLRLHPTSQPLFAFEWRDPEMGISGQLTWTRLPQGFKNSPTLFNEALHRDLADFRIQHPDLILLQYVDDLLLAATSELDCQQGTRALLQTLGNLGYRASAKKAQICQKQVKYLGYLLKEGQRWLTEARKETVMGQPTPKTPRQLREFLGKAGFCRLFIPGFAEMAAPLYPLTKPGTLFNWGPDQQKAYQEIKQALLTAPALGLPDLTKPFELFVDEKQGYAKGVLTQKLGPWRRPVAYLSKKLDPVAAGWPPCLRMVAAIAVLTKDAGKLTMGQPLVILAPHAVEALVKQPPDRWLSNARMTHYQALLLDTDRVQFGPVVALNPATLLPLPEEGLQHNCLDILAEAHGTRPDLTDQPLPDADHTWYTDGSSLLQEGQRKAGAAVTTETEVIWAKALPAGTSAQRAELIALTQALKMAEGKKLNVYTDSRYAFATAHIHGEIYRRRGWLTSEGKEIKNKDEILALLKALFLPKRLSIIHCPGHQKGHSAEARGNRMADQAARKAAITETPDTSTLLIENSSPSGGSKRTADGSEFESPKKKRKVGSGPAAKRVKLD

SEQ ID NO: 5839 - protein, 19 aa, synthetic construct
  REGION 1..19: note = Description of Artificial Sequence: Synthetic peptide
MKRTADGSEFESPKKKRKV

SEQ ID NO: 5840 - protein, 1367 aa, synthetic construct
  REGION 1..1367: note = Description of Artificial Sequence: Synthetic polypeptide
DKKYSIGLDIGTNSVGWAVITDEYKVPSKKFKVLGNTDRHSIKKNLIGALLFDSGETAEATRLKRTARRRYTRRKNRICYLQEIFSNEMAKVDDSFFHRLEESFLVEEDKKHERHPIFGNIVDEVAYHEKYPTIYHLRKKLVDSTDKADLRLIYLALAHMIKFRGHFLIEGDLNPDNSDVDKLFIQLVQTYNQLFEENPINASGVDAKAILSARLSKSRKLENLIAQLPGEKKNGLFGNLIALSLGLTPNFKSNFDLAEDAKLQLSKDTYDDDLDNLLAQIGDQYADLFLAAKNLSDAILLSDILRVNTEITKAPLSASMIKRYDEHHQDLTLLKALVRQQLPEKYKEIFFDQSKNGYAGYIDGGASQEEFYKFIKPILEKMDGTEELLVKLKREDLLRKQRTFDNGSIPHQIHLGELHAILRRQEDFYPFLKDNREKIEKILTFRIPYYVGPLARGNSRFAWMTRKSEETITPWNFEEVVDKGASAQSFIERMTNFDKNLPNEKVLPKHSLLYEYFTVYNELTKVKYVTEGMRKPAFLSGEQKKAIVDLLFKTNRKVTVKQLKEDYFKKIECFDSVEISGVEDRFNASLGTYHDLLKIIKDKDFLDNEENEDILEDIVLTLTLFEDREMIEERLKTYAHLFDDKVMKQLKRRRYTGWGRLSRKLINGIRDKQSGKTILDFLKSDGFANRNFMQLIHDDSLTFKEDIQKAQVSGQGDSLHEHIANLAGSPAIKKGILQTVKVVDELVKVMGRHKPENIVIEMARENQTTQKGQKNSRERMKRIEEGIKELGSQILKEHPVENTQLQNEKLYLYYLQNGRDMYVDQELDINRLSDYDVDAIVPQSFLKDDSIDNKVLTRSDKNRGKSDNVPSEEVVKKMKNYWRQLLNAKLITQRKFDNLTKAERGGLSELDKAGFIKRQLVETRQITKHVAQILDSRMNTKYDENDKLIREVKVITLKSKLVSDFRKDFQFYKVREINNYHHAHDAYLNAVVGTALIKKYPKLESEFVYGDYKVYDVRKMIAKSEQEIGKATAKYFFYSNIMNFFKTEITLANGEIRKRPLIETNGETGEIVWDKGRDFATVRKVLSMPQVNIVKKTEVQTGGFSKESILPKRNSDKLIARKKDWDPKKYGGFDSPTVAYSVLVVAKVEKGKSKKLKSVKELLGITIMERSSFEKNPIDFLEAKGYKEVKKDLIIKLPKYSLFELENGRKRMLASAGELQKGNELALPSKYVNFLYLASHYEKLKGSPEDNEQKQLFVEQHKHYLDEIIEQISEFSKRVILADANLDKVLSAYNKHRDKPIREQAENIIHLFTLTNLGAPAAFKYFDTTIDRKRYTSTKEVLDATLIHQSITGLYETRIDLSQLGGD

SEQ ID NO: 5841 - protein, 34 aa, synthetic construct
  REGION 1..34: note = Description of Artificial Sequence: Synthetic polypeptide
SGGSSGGSKRTADGSEFESPKKKRKVSGGSSGGS

SEQ ID NO: 5842 - protein, 677 aa, synthetic construct; identical to SEQ ID NO: 5782
  REGION 1..677: note = Description of Artificial Sequence: Synthetic polypeptide

SEQ ID NO: 5843 - protein, 22 aa, synthetic construct
  REGION 1..22: note = Description of Artificial Sequence: Synthetic peptide
SGGSKRTADGSEFESPKKKRKV

SEQ ID NO: 5844 - protein, 12 aa, synthetic construct
  REGION 1..12: note = Description of Artificial Sequence: Synthetic peptide
GSGPAAKRVKLD

SEQ ID NO: 5845 - protein, 150 aa, synthetic construct
  REGION 1..150: note = Description of Artificial Sequence: Synthetic polypeptide
  SITE 1..150: note = This sequence may encompass 1-30 "Gly Gly Gly Gly Ser" repeating units
GGGGSGGGGSGGGGSGGGGSGGGGSGGGGSGGGGSGGGGSGGGGSGGGGSGGGGSGGGGSGGGGSGGGGSGGGGSGGGGSGGGGSGGGGSGGGGSGGGGSGGGGSGGGGSGGGGSGGGGSGGGGSGGGGSGGGGSGGGGSGGGGSGGGGS

SEQ ID NO: 5846 - protein, 30 aa, synthetic construct
  REGION 1..30: note = Description of Artificial Sequence: Synthetic polypeptide
  SITE 1..30: note = This sequence may encompass 1-30 residues
GGGGGGGGGGGGGGGGGGGGGGGGGGGGGG

SEQ ID NO: 5847 - protein, 150 aa, synthetic construct
  REGION 1..150: note = Description of Artificial Sequence: Synthetic polypeptide
  SITE 1..150: note = This sequence may encompass 1-30 "Glu Ala Ala Ala Lys" repeating units
EAAAKEAAAKEAAAKEAAAKEAAAKEAAAKEAAAKEAAAKEAAAKEAAAKEAAAKEAAAKEAAAKEAAAKEAAAKEAAAKEAAAKEAAAKEAAAKEAAAKEAAAKEAAAKEAAAKEAAAKEAAAKEAAAKEAAAKEAAAKEAAAKEAAAK

SEQ ID NO: 5848 - protein, 90 aa, synthetic construct
  REGION 1..90: note = Description of Artificial Sequence: Synthetic polypeptide
  SITE 1..90: note = This sequence may encompass 1-30 "Gly Gly Ser" repeating units
GGSGGSGGSGGSGGSGGSGGSGGSGGSGGSGGSGGSGGSGGSGGSGGSGGSGGSGGSGGSGGSGGSGGSGGSGGSGGSGGSGGSGGSGGS

SEQ ID NO: 5849 - protein, 120 aa, synthetic construct
  REGION 1..120: note = Description of Artificial Sequence: Synthetic polypeptide
  SITE 1..120: note = This sequence may encompass 1-30 "Ser Gly Gly Ser" repeating units
SGGSSGGSSGGSSGGSSGGSSGGSSGGSSGGSSGGSSGGSSGGSSGGSSGGSSGGSSGGSSGGSSGGSSGGSSGGSSGGSSGGSSGGSSGGSSGGSSGGSSGGSSGGSSGGSSGGSSGGS

SEQ ID NO: 5850 - protein, 60 aa, synthetic construct
  REGION 1..60: note = Description of Artificial Sequence: Synthetic polypeptide
  MOD_RES 1: note = Any amino acid
  MOD_RES 3: note = Any amino acid
  MOD_RES 5: note = Any amino acid
  MOD_RES 7: note = Any amino acid
  MOD_RES 9: note = Any amino acid
  MOD_RES 11: note = Any amino acid
  MOD_RES 13: note = Any amino acid
  MOD_RES 15: note = Any amino acid
  MOD_RES 17: note = Any amino acid
  MOD_RES 19: note = Any amino acid
  MOD_RES 21: note = Any amino acid
  MOD_RES 23: note = Any amino acid
  MOD_RES 25: note = Any amino acid
  MOD_RES 27: note = Any amino acid
  MOD_RES 29: note = Any amino acid
  MOD_RES 31: note = Any amino acid
  MOD_RES 33: note = Any amino acid
  MOD_RES 35: note = Any amino acid
  MOD_RES 37: note = Any amino acid
  MOD_RES 39: note = Any amino acid
  MOD_RES 41: note = Any amino acid
  MOD_RES 43: note = Any amino acid
  MOD_RES 45: note = Any amino acid
  MOD_RES 47: note = Any amino acid
  MOD_RES 49: note = Any amino acid
  MOD_RES 51: note = Any amino acid
  MOD_RES 53: note = Any amino acid
  MOD_RES 55: note = Any amino acid
  MOD_RES 57: note = Any amino acid
  MOD_RES 59: note = Any amino acid
  SITE 1..60: note = This sequence may encompass 1-30 "Xaa Pro" repeating units
XPXPXPXPXPXPXPXPXPXPXPXPXPXPXPXPXPXPXPXPXPXPXPXPXPXPXPXPXPXP

SEQ ID NO: 5851 - protein, 16 aa, synthetic construct
  REGION 1..16: note = Description of Artificial Sequence: Synthetic peptide
SGSETPGTSESATPES

SEQ ID NO: 5852 - protein, 32 aa, synthetic construct
  REGION 1..32: note = Description of Artificial Sequence: Synthetic polypeptide
SGGSSGGSSGSETPGTSESATPESSGGSSGGS

SEQ ID NO: 5853 - protein, 33 aa, synthetic construct
  REGION 1..33: note = Description of Artificial Sequence: Synthetic polypeptide
SGGSSGGSSGSETPGTSESATPESSGGSSGGSS

SEQ ID NO: 5854 - protein, 10 aa, synthetic construct
  REGION 1..10: note = Description of Artificial Sequence: Synthetic peptide
SGGSGGSGGS

SEQ ID NO: 5855 - protein, 4 aa, synthetic construct
  REGION 1..4: note = Description of Artificial Sequence: Synthetic peptide
SGGS

SEQ ID NO: 5856 - protein, 60 aa, synthetic construct
  REGION 1..60: note = Description of Artificial Sequence: Synthetic polypeptide
SGGSSGGSSGSETPGTSESATPESAGSYPYDVPDYAGSAAPAAKKKKLDGSGSGGSSGGS

SEQ ID NO: 5857 - RNA, 76 nt, synthetic construct
  misc_feature 1..76: note = Description of Artificial Sequence: Synthetic oligonucleotide
  source 1..76: mol_type = other RNA
gttttagagctagaaatagcaagttaaaataaggctagtccgttatcaacttgaaaaagtggcaccgagtcggtgc

SEQ ID NO: 5858 - RNA, 76 nt, synthetic construct
  misc_feature 1..76: note = Description of Artificial Sequence: Synthetic oligonucleotide
  source 1..76: mol_type = other RNA
gtttgagagctagaaatagcaagtttaaataaggctagtccgttatcaacttgaaaaagtgggaccgagtcggtcc

SEQ ID NO: 5859 - RNA, 86 nt, synthetic construct
  misc_feature 1..86: note = Description of Artificial Sequence: Synthetic oligonucleotide
  source 1..86: mol_type = other RNA
gtttaagagctatgctggaaacagcatagcaagtttaaataaggctagtccgttatcaacttgaaaaagtggcaccgagtcggtgc

SEQ ID NO: 5860 - skipped

SEQ ID NO: 5861 - protein, 1465 aa, Homo sapiens
MPEQERQITAREGASRKILSKLSLPTRAWEPAMKKSFAFDNVGYEGGLDGLGPSSQVATSTVRILGMTCQSCVKSIEDRISNLKGIISMKVSLEQGSATVKYVPSVVCLQQVCHQIGDMGFEASIAEGKAASWPSRSLPAQEAVVKLRVEGMTCQSCVSSIEGKVRKLQGVVRVKVSLSNQEAVITYQPYLIQPEDLRDHVNDMGFEAAIKSKVAPLSLGPIDIERLQSTNPKRPLSSANQNFNNSETLGHQGSHVVTLQLRIDGMHCKSCVLNIEENIGQLLGVQSIQVSLENKTAQVKYDPSCTSPVALQRAIEALPPGNFKVSLPDGAEGSGTDHRSSSSHSPGSPPRNQVQGTCSTTLIAIAGMTCASCVHSIEGMISQLEGVQQISVSLAEGTATVLYNPSVISPEELRAAIEDMGFEASVVSESCSTNPLGNHSAGNSMVQTTDGTPTSVQEVAPHTGRLPANHAPDILAKSPQSTRAVAPQKCFLQIKGMTCASCVSNIERNLQKEAGVLSVLVALMAGKAEIKYDPEVIQPLEIAQFIQDLGFEAAVMEDYAGSDGNIELTITGMTCASCVHNIESKLTRTNGITYASVALATSKALVKFDPEIIGPRDIIKIIEEIGFHASLAQRNPNAHHLDHKMEIKQWKKSFLCSLVFGIPVMALMIYMLIPSNEPHQSMVLDHNIIPGLSILNLIFFILCTFVQLLGGWYFYVQAYKSLRHRSANMDVLIVLATSIAYVYSLVILVVAVAEKAERSPVTFFDTPPMLFVFIALGRWLEHLAKSKTSEALAKLMSLQATEATVVTLGEDNLIIREEQVPMELVQRGDIVKVVPGGKFPVDGKVLEGNTMADESLITGEAMPVTKKPGSTVIAGSINAHGSVLIKATHVGNDTTLAQIVKLVEEAQMSKAPIQQLADRFSGYFVPFIIIMSTLTLVVWIVIGFIDFGVVQRYFPNPNKHISQTEVIIRFAFQTSITVLCIACPCSLGLATPTAVMVGTGVAAQNGILIKGGKPLEMAHKIKTVMFDKTGTITHGVPRVMRVLLLGDVATLPLRKVLAVVGTAEASSEHPLGVAVTKYCKEELGTETLGYCTDFQAVPGCGIGCKVSNVEGILAHSERPLSAPASHLNEAGSLPAEKDAVPQTFSVLIGNREWLRRNGLTISSDVSDAMTDHEMKGQTAILVAIDGVLCGMIAIADAVKQEAALAVHTLQSMGVDVVLITGDNRKTARAIATQVGINKVFAEVLPSHKVAKVQELQNKGKKVAMVGDGVNDSPALAQADMGVAIGTGTDVAIEAADVVLIRNDLLDVVASIHLSKRTVRRIRINLVLALIYNLVGIPIAAGVFMPIGIVLQPWMGSAAMAASSVSVVLSSLQLKCYKKPDLERYEAQAHGHMKPLTASQVSVHIGMDDRWRDSPRATPWDQVSYVSQVSLSSLTSDKPSRHSAAADDDGDKWSLLLNGRDEEQYI

SEQ ID NO: 5862 - DNA, 20 bp, synthetic construct
  misc_feature 1..20: note = Description of Artificial Sequence: Synthetic oligonucleotide
  source 1..20: mol_type = other DNA
cctcaggaaggttctggctg

SEQ ID NO: 5863 - DNA, 20 bp, synthetic construct
  misc_feature 1..20: note = Description of Artificial Sequence: Synthetic oligonucleotide
  source 1..20: mol_type = other DNA
caggaaggttctggctgtgg

SEQ ID NO: 5864 - DNA, 20 bp, synthetic construct
  misc_feature 1..20: note = Description of Artificial Sequence: Synthetic oligonucleotide
  source 1..20: mol_type = other DNA
aggaaggttctggctgtggt

SEQ ID NO: 5865 - DNA, 20 bp, synthetic construct
  misc_feature 1..20: note = Description of Artificial Sequence: Synthetic oligonucleotide
  source 1..20: mol_type = other DNA
ggaaggttctggctgtggtg

SEQ ID NO: 5866 - DNA, 20 bp, synthetic construct
  misc_feature 1..20: note = Description of Artificial Sequence: Synthetic oligonucleotide
  source 1..20: mol_type = other DNA
tctggctgtggtggggactg

SEQ ID NO: 5867 - DNA, 20 bp, synthetic construct
  misc_feature 1..20: note = Description of Artificial Sequence: Synthetic oligonucleotide
  source 1..20: mol_type = other DNA
ggctgtggtggggactgcgg

SEQ ID NO: 5868 - DNA, 20 bp, synthetic construct
  misc_feature 1..20: note = Description of Artificial Sequence: Synthetic oligonucleotide
  source 1..20: mol_type = other DNA
acgtacctctttacagtatt

SEQ ID NO: 5869 - DNA, 20 bp, synthetic construct
  misc_feature 1..20: note = Description of Artificial Sequence: Synthetic oligonucleotide
  source 1..20: mol_type = other DNA
tttggtgactgccacgccca

SEQ ID NO: 5870 - DNA, 20 bp, synthetic construct
  misc_feature 1..20: note = Description of Artificial Sequence: Synthetic oligonucleotide
  source 1..20: mol_type = other DNA
ttggtgactgccacgcccaa

SEQ ID NO: 5871 - DNA, 20 bp, synthetic construct
  misc_feature 1..20: note = Description of Artificial Sequence: Synthetic oligonucleotide
  source 1..20: mol_type = other DNA
gaaggttctggctgtggtgg

SEQ ID NO: 5872 - DNA, 20 bp, synthetic construct
  misc_feature 1..20: note = Description of Artificial Sequence: Synthetic oligonucleotide
  source 1..20: mol_type = other DNA
ctggctgtggtggggactgc

SEQ ID NO: 5873 - DNA, 20 bp, synthetic construct
  misc_feature 1..20: note = Description of Artificial Sequence: Synthetic oligonucleotide
  source 1..20: mol_type = other DNA
gggactgcggaggccagcag

SEQ ID NO: 5874 - DNA, 20 bp, synthetic construct
  misc_feature 1..20: note = Description of Artificial Sequence: Synthetic oligonucleotide
  source 1..20: mol_type = other DNA
tggctgtggtggggactgcg

SEQ ID NO: 5875 - DNA, 20 bp, synthetic construct
  misc_feature 1..20: note = Description of Artificial Sequence: Synthetic oligonucleotide
  source 1..20: mol_type = other DNA
gtggtggggactgcggaggc

SEQ ID NO: 5876 - DNA, 20 bp, synthetic construct
  misc_feature 1..20: note = Description of Artificial Sequence: Synthetic oligonucleotide
  source 1..20: mol_type = other DNA
gtggggactgcggaggccag

SEQ ID NO: 5877 - DNA, 20 bp, synthetic construct
  misc_feature 1..20: note = Description of Artificial Sequence: Synthetic oligonucleotide
  source 1..20: mol_type = other DNA
atttggtgactgccacgccc

SEQ ID NO: 5878 - DNA, 20 bp, synthetic construct
  misc_feature 1..20: note = Description of Artificial Sequence: Synthetic oligonucleotide
  source 1..20: mol_type = other DNA
gttctggctgtggtggggac

SEQ ID NO: 5879 - DNA, 20 bp, synthetic construct
  misc_feature 1..20: note = Description of Artificial Sequence: Synthetic oligonucleotide
  source 1..20: mol_type = other DNA
gctgtggtggggactgcgga

SEQ ID NO: 5880 - DNA, 20 bp, synthetic construct
  misc_feature 1..20: note = Description of Artificial Sequence: Synthetic oligonucleotide
  source 1..20: mol_type = other DNA
tggtggggactgcggaggcc

SEQ ID NO: 5881 - DNA, 20 bp, synthetic construct
  misc_feature 1..20: note = Description of Artificial Sequence: Synthetic oligonucleotide
  source 1..20: mol_type = other DNA
tggggactgcggaggccagc

SEQ ID NO: 5882 - DNA, 20 bp, synthetic construct
  misc_feature 1..20: note = Description of Artificial Sequence: Synthetic oligonucleotide
  source 1..20: mol_type = other DNA
tgactgccacgcccaagggt

SEQ ID NO: 5883 - DNA, 20 bp, synthetic construct
  misc_feature 1..20: note = Description of Artificial Sequence: Synthetic oligonucleotide
  source 1..20: mol_type = other DNA
ttctggctgtggtggggact

SEQ ID NO: 5884 - DNA, 20 bp, synthetic construct
  misc_feature 1..20: note = Description of Artificial Sequence: Synthetic oligonucleotide
  source 1..20: mol_type = other DNA
actgcccctcaggaaggttc

SEQ ID NO: 5885 - DNA, 20 bp, synthetic construct
  misc_feature 1..20: note = Description of Artificial Sequence: Synthetic oligonucleotide
  source 1..20: mol_type = other DNA
atgtggccacactgcccctc

SEQ ID NO: 5886 - DNA, 20 bp, synthetic construct
  misc_feature 1..20: note = Description of Artificial Sequence: Synthetic oligonucleotide
  source 1..20: mol_type = other DNA
ggccacactgcccctcagga

SEQ ID NO: 5887-5888 - skipped (2 entries)

SEQ ID NO: 5889 - RNA, 21 nt, synthetic construct
  misc_feature 1..21: note = Description of Artificial Sequence: Synthetic oligonucleotide
  source 1..21: mol_type = other RNA
gttggtgactgccacgcccaa

SEQ ID NO: 5890 - RNA, 21 nt, synthetic construct
  misc_feature 1..21: note = Description of Artificial Sequence: Synthetic oligonucleotide
  source 1..21: mol_type = other RNA
gtttggtgactgccacgccca

SEQ ID NO: 5891 - RNA, 21 nt, synthetic construct
  misc_feature 1..21: note = Description of Artificial Sequence: Synthetic oligonucleotide
  source 1..21: mol_type = other RNA
gtctggctgtggtggggactg

SEQ ID NO: 5892 - RNA, 21 nt, synthetic construct
  misc_feature 1..21: note = Description of Artificial Sequence: Synthetic oligonucleotide
  source 1..21: mol_type = other RNA
gacgtacctctttacagtatt

SEQ ID NO: 5893 - RNA, 21 nt, synthetic construct
  misc_feature 1..21: note = Description of Artificial Sequence: Synthetic oligonucleotide
  source 1..21: mol_type = other RNA
gaggaaggttctggctgtggt

SEQ ID NO: 5894 - RNA, 21 nt, synthetic construct
  misc_feature 1..21: note = Description of Artificial Sequence: Synthetic oligonucleotide
  source 1..21: mol_type = other RNA
gcaggaaggttctggctgtgg

SEQ ID NO: 5895 - RNA, 21 nt, synthetic construct
  misc_feature 1..21: note = Description of Artificial Sequence: Synthetic oligonucleotide
  source 1..21: mol_type = other RNA
gcctcaggaaggttctggctg

SEQ ID NO: 5896 - protein, 5 aa, Homo sapiens
SEHPL

SEQ ID NO: 5897 - protein, 16 aa, synthetic construct
  REGION 1..16: note = Description of Artificial Sequence: Synthetic peptide
RQIKIWFQNRRMKWKK

SEQ ID NO: 5898 - protein, 9 aa, synthetic construct
  REGION 1..9: note = Description of Artificial Sequence: Synthetic peptide
RRRRRRRRR

SEQ ID NO: 5899 - protein, 8 aa, synthetic construct
  REGION 1..8: note = Description of Artificial Sequence: Synthetic peptide
RRRRRRRR

SEQ ID NO: 5900 - skipped

SEQ ID NO: 5901 - DNA, 76 bp, synthetic construct
  misc_feature 1..76: note = Description of Artificial Sequence: Synthetic oligonucleotide
  source 1..76: mol_type = other DNA
tacagtatttggtgactgccacgcccaagggttgttcactgctggcctccgcagtccccaccacagccagaacctt

SEQ ID NO: 5902 - protein, 25 aa, synthetic construct
  REGION 1..25: note = Description of Artificial Sequence: Synthetic peptide
CYKTVAVGLPQFSSAFATGVVALVK

SEQ ID NO: 5903 - protein, 21 aa, synthetic construct
  REGION 1..21: note = Description of Artificial Sequence: Synthetic peptide
  SITE 1..21: note = This sequence may encompass 1, 3 or 7 "Gly Gly Ser" repeating units
GGSGGSGGSGGSGGSGGSGGS
